(19) United States
(12) Patent Application Publication
(10) Pub. No.: US 2015/0191725 A1
(43) Pub. Date: Jul. 9, 2015

(54) Oligonucleotide for the Treatment of Muscular Dystrophy Patients

(71) Applicant: Prosensa Technologies B.V., Leiden (NL)

(72) Inventor: Judith Christina Theodora van Deutekom, Dordrecht (NL)

(21) Appl. No.: 14/581,633

(22) Filed: Dec. 23, 2014

Related U.S. Application Data
(63) Continuation of application No. PCT/NL2013/050487, filed on Jul. 3, 2013.
(60) Provisional application No. 61/667,517, filed on Jul. 3, 2012.

(30) Foreign Application Priority Data
Jul. 3, 2012 (EP) 12174781.0

(51) Int. Cl. C12N 15/113

(52) U.S. Cl. CPC C12N 15/113; C12N 2310/11

(57) ABSTRACT

The invention relates to an oligonucleotide and to a pharmaceutical composition comprising said oligonucleotide. This oligonucleotide is able to bind to a region of a first exon from a dystrophin pre-mRNA and to a region of a second exon within the same pre-mRNA, wherein said region of said second exon has at least 50% identity with said region of said first exon, wherein said oligonucleotide is suitable for the skipping of said first and second exons of said pre-mRNA, and preferably the entire stretch of exons in between.

### FIELD OF THE INVENTION

[0001] The invention relates to the field of human genetics, more specifically to a method for designing a single oligonucleotide which is preferably capable of inducing the skipping of two or more exons of a pre-mRNA. The invention further provides said oligonucleotide, a pharmaceutical composition comprising said oligonucleotide, and the use of said oligonucleotide as identified herein.

### BACKGROUND OF THE INVENTION

[0002] Oligonucleotides are emerging in medicine for treating genetic disorders like muscular dystrophy. Muscular dystrophy (MD) refers to genetic diseases that are characterized by progressive weakness and degeneration of skeletal muscles. Duchenne muscular dystrophy (DMD) and Becker muscular dystrophy (BMD) are the most common childhood forms of muscular dystrophy and are used herein to illustrate the invention. DMD is a severe, lethal neuromuscular disorder resulting in a dependency on wheelchair support before the age of 12 and DMD patients often die before the age of thirty due to respiration or heart failure.

[0003] DMD is caused by mutations in the DMD gene; mainly frame-shifting deletions or duplications of one or more exons, small nucleotide insertions or deletions, or by nonsense point mutations, which typically result in the absence of functional dystrophin. During the last decade, specifically induced modification of splicing in order to restore the disrupted reading frame of the DMD transcript has emerged as a promising therapy for Duchenne muscular dystrophy (DMD) (van Ommen G. J. et al, Yokota T., et al, van Deutekom et al., Goemans N. M., et al.,). Using sequence-specific Antisense OligoNucleotides (AONs) which target a specific exon flanking or containing the mutation and interfere with its splicing signs skipping of that exon can be induced during the processing of the DMD pre-mRNA. Despite the resulting truncated transcript, the open reading frame is restored and a protein is introduced which is similar to those found in the typically milder Becker muscular dystrophy patients. AON-induced exon skipping provides a mutation-specific, and thus potentially personalized therapeutic approach for DMD patients and specific severe BMD patients. Since most mutations cluster around exons 45 to 55 in the DMD gene, the skipping of one specific exon in that region may be therapeutic for a subpopulation of patients with a variety of mutations. The skipping of exon 51 affects the largest subpopuiations of patients (approximately 13%), including those with deletions of exons 45 to 50, 48 to 50, 50, or 52. For some mutations, the skipping of more than one exon is required to restore the open reading frame. For instance, for DMD patients with a deletion of exon 46 to exon 50 in the DMD gene, only the skipping of both exons 45 and 51 would be corrective. To treat these patients, administration of two oligonucleotides, one targeting exon 45 and the other targeting exon 51, is required. The feasibility of skipping two or multiple consecutive exons by using a combination of AONs, either in a cocktail or in virally delivered gene constructs, has been studied extensively (Aartsma-Rus A. et al., 2004; Béroud C., et al.; Van Vliet L., et al.; Yokota T., et al.; Goyenvalle A., et al.,). Multi-exon skipping would be applicable to combined subpopulations of patients, allow the mimicking of deletions known to be associated with relatively mild phenotypes, and would provide a tool to address rare mutations outside the hot spot deletion region in the DMD gene. A drawback for development of drugs comprising multiple oligonucleotides is however that drug regulation authorities may regard oligonucleotides of different sequences as different drugs, each requiring prove of stable production, toxicity- and clinical testing, Therefore, there is a need for a single molecular compound capable of inducing the skipping of at least two exons to facilitate the treatment of combined subgroups of DMD patients.

### FIGURE LEGENDS

[0004] FIGS. 1A-1.C. A) Localisation of PS811 (SEQ ID NO:1673), PS814 (SEQ ID NO:1675), PS815 (SEQ ID NO:1677) and PS816 (SEQ ID NO:1679) in the sequence stretch that is highly similar (63%) in exon 10 and exon 18. B) AON characteristics and efficiencies. The percentage of reverse complementarity (rev. comp.) of each AON to either exon 10 or exon 18 is indicated. C) RT-PCR analysis. In healthy human muscle cells (i.e. differentiated myotubes) all four AONs were effective in inducing the skipping of a multi-exon stretch from exon 10 to exon 18. PS811 and PS816 were most efficient. Boxes on the left site of the figure represent the content of the PCR amplified transcript products. (M: DNA size marker; NT: non-treated cells)

[0005] FIGS. 2A-2B. A) RT-PCR analysis. In healthy human muscle cells (i.e. differentiated myotubes), AONs with different lengths, but with the same core target sequence within the sequence stretch that is highly similar (63%) in exon 10 and exon 18, were tested. PS816 (SEQ ID NO:1679), a 25-mer, and PS1059 (SEQ ID NO:1684), a 21-mer, were most efficient (68% and 79% exon 10 to 18 skipping respectively). The 15-mer PS1050 (SEQ ID NO:1682) was less effective. Boxes on the left site of the figure represent the content of the PCR amplified transcript products. (M: DNA size marker; NT: non-treated cells) B) AON characteristics and efficiencies. The percentage of reverse complementarity (rev. comp.) of each AON to either exon 10 or exon 18 is indicated.

[0006] FIGS. 3A-3B, A) RT-PCR analysis. In healthy human muscle cells (i.e. differentiated myotubes), AONs with different base chemistry were tested: PS816 (a regular 2′-O-methyl phosphorothioate RNA AON; SEQ ID NO:1679), PS1168 (PS816 but with all As replaced by 2,6-diaminopurines; SEQ ID NO:1681), PS1059 (a regular 2′-O-methyl phosphorothioate RNA AON; SEQ ID NO:1684), PS1138 (PS1059 but with all Cs replaced by 5-methylcytosines; SEQ ID NO:1685), or PS1170 (PS1059 but with all As replaced by 2,6-diaminopurines; SEQ ID NO:1686). The skipping of exons 10 to 18 was observed for all AONs tested. PS816 was most efficient (88%). In these specific sequences the base modifications did not further improve bioactivity. Boxes on the left site of the figure indicate the PCR amplified transcript products. (M: DNA size marker; NT: non-treated cells) B) AON characteristics and efficiencies.

[0007] FIGS. 4A-4C, A) Highly similar sequence stretches in exons 10, 18, 30, and 47, as multiple targets for PS816. The SEQ ID NO's are referring to the EMBOSS full length exon alignments (as in Table 2). In grey font the sequence part that was not included in the EMBOSS alignment but that is adjacent to the part with high reverse complementarity to PS816. B) Overview of exon alignment and PS816 reverse complementarity (rev. comp.) percentages. C) RT-PCR analysis. Multiple exon stretch skipping may be induced by PS816, here identified as exon 10 to 18, exon 10 to 30, and exon 10 to 47 skipping. The resulting transcripts are in-frame. These were not detected in non-treated cells (NT). Boxes on the left and right site of the figure represent the content of the PCR amplified transcript products. (M: DNA size marker)

[0008] FIGS. 5A-5C. A) Localisation of PS1185 (SEQ ID NO:1706), PS1186 (SEQ ID NO:1707), and PS1188 (SEQ ID NO:1713) in the sequence stretch that is highly similar (80%) in exon 45 and exon 55. The table summarizes AON characteristics. The percentage of reverse complementarity (rev, comp.) of each AON to either exon 45 or exon 55 is indicated. B) RT-PCR analysis. In healthy human muscle cells (i.e. differentiated myotubes) all three AONs were effective in inducing the skipping of a multi-exon stretch from exon 45 to exon 55. Boxes on the left site of the figure represent the content of PCR amplified transcript products. (M: DNA size marker; NT: non-treated cells)

### DESCRIPTION OF THE INVENTION

[0009] The invention provides a method for designing a single oligonucleotide, wherein said oligonucleotide is capable of binding to a region of a first exon and to a region of a second exon within the same pre-mRNA, wherein said region of said second exon has at least 50% identity with said region of said first exon. The oligonucleotides obtainable by said method are preferably capable of inducing the skipping of said first exon and said second exon of said pre-mRNA. Preferably, the skipping of additional exons) is also induced, wherein said additional exons) is/are preferably located in between said first and said second exon. The resulting transcript of said pre-mRNA, wherein said exons are skipped, is in-frame.

### Oligonucleotide

[0010] In a first aspect, the invention relates to an oligonucleotide that is capable of binding to a region of a first exon and to a region of a second exon within the same pre-mRNA, Wherein said region of said second exon has at least 50% identity with said region of said first exon.

[0011] This oligonucleotide is preferably capable of inducing the skipping of said first and second exons of said pre-mRNA; more preferably the skipping of additional exon(s) is induced, wherein said additional exon(s) is/are preferably located in between said first and said second exons, and wherein the resulting transcript is in frame.

[0012] Exon skipping interferes with the natural splicing processes occurring within a eukaryotic cell. In higher eukaryotes the genetic information for proteins in the DNA of the cell is encoded in exons which are separated from each other by intronic sequences. These introns are in some cases very long. The transcription machinery of eukaryotes generates a pre-mRNA which contains both exons and introns, while the splicing machinery, often already during the ongoing production of the pre-mRNA, generates the actual coding mRNA for the protein by removing the introns and connecting the exons present in the pre-mRNA during a process called

[0013] An oligonucleotide of the invention that is capable of binding to a region of a first exon from a pre-mRNA and to a region of a second exon within the same pre-mRNA is to be construed as an oligonucleotide suitable for binding to a region of a first exon from a pre-mRNA and suitable for binding to a region of a second exon within the same pre-mRNA. Such oligonucleotide of the invention is characterized by its binding feature (i.e. capable of binding), when used with or when used in combination with a pre-mRNA, preferably in a cell. Within this context “capable of” may be replaced by “able to”. Thus, the person skilled in the art will appreciate that an oligonucleotide capable of binding to a region of a first exon and capable of binding to a region of a second exon within the same pre-mRNA, defined by a nucleotide sequence, defines said oligonucleotide structurally, i.e. said oligonucleotide has a sequence such that it is reverse-complementary with the sequence of said region of said first exon and also reverse-complementary with the sequence of said region of said second exon within the same pre-mRNA. The degree of reverse-complementarity with said regions of said first and/or said second exon which is needed for an oligonucleotide of the invention may be less than 100%. A certain amount of mismatches or one or two gaps may be allowed, as is addressed further herein. The nucleotide sequence of a region of a first exon which has at least 50% identity with said region of said second exon (or the nucleotide sequence of a region of a second exon which has at least 50% identity with said region of said first exon), to which the oligonucleotide of the invention is capable of binding, could be designed using a method of the invention as explained later herein. Preferred pre-mRNA is a dystrophin pre-mRNA. Preferred combinations of first and second exons of the dystrophin pre-mRNA and preferred regions of said first and second dystrophin exons are defined in table 2. The oligonucleotide of the invention is preferably capable of inducing the skipping of said first and second exons of said dystrophin pre-mRNA; more preferably the skipping of additional exon(s) is induced, wherein said additional exon(s) is/are preferably located in between said first and said second exons, and wherein the resulting dystrophin transcript is in frame, preferably as in Table 1,

[0014] A transcript is in frame when it has an open reading frame that allows for the production of a protein. The in-frame status of an mRNA can be assessed by sequence and/or RT-PCR analysis as known to a person skilled in the art. The resulting protein that results from translation of the in-frame transcript can be analysed by immunofluorescence and/or western blot analysis using antibodies that cross-react with said protein, as known to a person skilled in the art. Throughout the invention, an oligonucleotide as identified herein may be said functional if a resulting in frame transcript is identified by RT-PCR and/or sequence analysis, or if the protein resulting from said in frame transcript is identified by immunofluorescence and/or Western blot analysis, in a relevant in vitro or in vivo system depending on the identity of the transcript. If the transcript is the dystrophin transcript, a relevant system may be a muscle cell, or myotube, or muscle fiber or myofiber, of a healthy donor or a DMD patient as explained later herein.

[0015] in an embodiment, a region of a second exon (present within the same pre-mRNA as a region of a first exon) has at least 50%, 55%, 60%, 65%, 70%, 75%, 80%, 85%, 90%, 95% or 100% identity with a region of a first exon as identified above (preferreds regions of a first and of a second dystrophin exon are identified in Table 2). The identity percentage may be assessed over the entire length of said first and/or second exon or over a region of 13, 14, 15, 16, 17, 18, 19, 20, 21, 22, 23, 24, 25, 26, 27, 28, 29, 30, 31, 32, 33, 34, 35, 36, 37, 38, 39, 40, 41, 42, 43, 44, 45, 46, 47, 48, 49, 50, 51, 52, 53, 54, 55, 56, 57, 58, 59, 60, 61, 62, 63, 64, 65, 66, 67, 68, 69, 70, 71, 72, 73, 74, 75, 76, 77, 78, 79, 80, 90, 100, 110, 120, 130, 140, 150, 160, 170, 180, 190, 200 or more nucleotides as exemplified for dystrophin exons herein. It is clear for the skilled person that a first and a second exon as identified herein are two distinct exons of one single pre-mRNA or two distinct exons within the same pre-mRNA. A first exon as identified herein may be located upstream of (i.e. 5′ of) the second exon within the same pre-mRNA as identified herein, or said second exon may be upstream of said first exon. Preferably, said first exon is located upstream from said second exon. It is clear for a skilled person that an oligonucleotide of the invention may be primarily designed to be capable of binding to a region of a first exon; in view of the identity of a region of said first and said second exons, said oligonucleotide may secondary also be capable of binding to said region of said second exon. The reverse design is possible: an oligonucleotide of the invention may be primarily designed to be capable of binding to a region of a second exon; in view of the identity of a region of said first and said second exons, said oligonucleotide may secondary also be capable of binding to said region of said first exon.

[0016] The identity percentage between a region of the first and a region of the second exon may be assessed over the whole region of said first exon, wherein that region may be shorter, longer or equally long as the part of that region to which the oligonucleotide of the invention is capable of binding. The region of the first exon and the region of the second exon as used herein may also be identified as the identity region(s). Preferably the region of the first exon which defines the identity with the region of the second exon is equally long or longer than the part of that region to which the oligonucleotide of the invention is capable of binding. It has to be understood that the oligonucleotide of the invention may be capable of binding to a smaller part, or a partly overlapping part, of said regions used to assess sequence identity of the first and/or second exon. It is therefore to be understood that an oligonucleotide which is capable of binding to a region of a first and of a second exon may bind a part of said region of said first exon and of said second exon. Said part may be as long as said region of said first and/or said second exon. Said part may be shorter or longer as said region of said first and/or said second exon. Said part may be comprised within said region of said first and/or said second exon. Said part may overlap with said region of said first and/or said second exon. This overlap may be of 1, 2, 3, 4, 5, or more nucleotides at the 5′ and/or at the 3′ side of the region of said first and/or second exon. The oligonucleotide may be at least 1, 2, 3, 4, 5, or more nucleotides longer or shorter than the region of said first and/or said second exon and may be at the 5′ or 3′ side of said region of the first and/or second region.

[0017] The region, being 13, 14, 15, 16, 17, 18, 19, 20, 21, 22, 23, 24, 25, 26, 27, 28, 29, 30, 31, 32, 33, 34, 35, 36, 37, 38, 39, 40, 41, 42, 43, 44, 45, 46, 47, 48, 49, 50, 51, 52, 53, 54, 55, 56, 57, 58, 59, 60, 61, 62, 63, 64, 65, 66, 67, 68, 69, 70, 71, 72, 73, 74, 75, 76, 77, 78, 79, 80, or up to 90, 100, 110, 120, 130, 140, 150, 160, 170, 180, 190, 200 or more nucleotides, used to calculate the percentage of identity between a first exon and a second exon may be a continuous stretch or may be interrupted by one, two, three, four or more gaps as long as the identity percentage over the whole region is at least 50%.

[0018] The identity percentage between the region of the first and the region of the second exons may be assessed using any program known to the skilled person. Preferably, said identity is assessed as follows: the best pair-wise alignment between the first and second exons using the online tool EMBOSS Matcher using default settings (Matrix: EDNAFULL, Gap_penalty: 16, Extend_penalty: 4).

[0019] An oligonucleotide as used herein preferably refers to an oligomer that is capable of binding to, targeting, hybridizing to, and/or is reverse-complementary to, a region or to a part of a region of a first and a second exon within the same pre-mRNA.

[0020] An oligonucleotide as identified herein (i.e. which is capable of binding to a region of a first exon and to a region of another exon (i.e., a second exon) within the same pre-mRNA, wherein said region of said second exon has at least 50% identity with said region of said first exon) is also preferably at least 80% reverse complementary to said region of said first exon and at least 45% reverse complementary to said region of said second exon. More preferably, said oligonucleotide is at least 85%, 90%, 95% or 100% reverse complementary to said region of said first and at least 50%, 55%, 60%, 65%, 70%, 75%, 80%, 85%, 90%, 95% or 100% reverse complementary to said region of said second exon. The reverse complementarity is preferably but not necessarily assessed over the Whole length of the oligonucleotide.

[0021] An oligonucleotide encompassed by the invention may comprise at least 10, 11, 12, 13, 14, 15, 16, 17, 18, 19, 20, 21, 22, 23, 24, 25, 26, 27, 28, 29, 30, 31, 32, 33, 34, 35, 36, 37, 38, 39, or 40 nucleotides. An oligonucleotide encompassed by the invention may comprise at most 40, 39, 38, 37, 36, 35, 34, 33, 32, 31, 30, 29, 28, 27, 26, 25, 24, 23, 22, 21, 20, 19, 18, 17, 16, 15, 14, 13, 12, 11, 10 nucleotides. The length of the oligonucleotide of the invention is defined by the total number of nucleotides encompassed in said oligonucleotide, irrespective of any modifications present in said oligonucleotide. As discussed further below, nucleotides may contain certain chemical modifications, but such modified nucleotides are still considered nucleotides in the context of the present invention. Depending on the chemistry of an oligonucleotide, the optimal length of an oligonucleotide may be distinct. For example the length of a 2′-O-methyl phosphorothioate oligonucleotide may be from 15 till 30. If this oligonucleotide is further modified as exemplified herein, the optimal length may be shortened to 14, 13 or even lower.

[0022] In a preferred embodiment, the oligonucleotide of the invention is not longer than 30 nucleotides, to limit the chance for reduced synthesis efficiency, yield, purity or scalability, reduced bioavailability and/or cellular uptake and trafficking, reduced safety, and to limit cost of goods. In a more preferred embodiment an oligonucleotide is from 15 and 25 nucleotides. Most preferably an oligonucleotide encompassed by the invention consists of 20, 21, 22, 23, 24, or 25 nucleotides. The length of the oligonucleotide of the invention is preferably such that the functionality or activity of the oligonucleotide is defined by inducing at least 5% of skipping of the first and second exons (and any exon(s) in between), or by facilitating that at least 5% of an in flame transcript is formed, when at least 100 nM of said oligonucleotide is being used to transfect a relevant cell culture in vitro. The assessment of the presence of said transcript has already been explained herein. A relevant cell culture is a cell culture wherein the pre-mRNA comprising said first and said exon is transcribed and spliced into an mRNA transcript. If the pre-mRNA is the dystrophin pre-mRNA, a relevant cell culture comprises (differentiated) muscle cells. In this case, at least 20% of an in frame transcript is formed when at least 250 nM of said oligonucleotide is being used.

[0023] A region of a first exon may be at least 13, 14, 15, 16, 17, 18, 19, 20, 21, 22, 23, 24, 25, 26, 27, 28, 29, 30, 31, 32, 33, 34, 35, 36, 37, 38, 39, 40, 41, 42, 43, 44, 45, 46, 47, 48, 49, 50, 51, 52, 53, 54, 55, 56, 57, 58, 59, 60, 61, 62, 63, 64, 65, 66, 67, 68, 69, 70, 71, 72, 73, 74, 75, 76, 77, 78, 79, 80, or up to 90, 100, 110, 120, 130, 140, 150, 160, 170, 180, 190, 200, or more nucleotides, A region of a first exon may also be defined as being at least 1%, 5%, 10%, 20%, 30%, 40%, 50%, 60%, 70%, 80%, 90% or 100% of the length of said exon. A region of a first exon may be called an identity region.

[0024] A region of a second exon may be at least 13, 14, 15, 16, 17, 18, 19, 20, 21, 22, 23, 24, 25, 76, 27, 28, 29, 30, 31, 32, 33, 34, 35, 36, 37, 38, 39, 40, 41, 42, 43, 44, 45, 46, 47, 48, 49, 50, 51, 52, 53, 54, 55, 56, 57, 58, 59, 60, 61, 62, 63, 64, 65, 66, 67, 68, 69, 70, 71, 72, 73, 74, 75, 76, 77, 78, 79, 80 or up to 90, 100, 110, 120, 130, 140, 150, 160, 170, 180, 190, 200, or more nucleotides, A region of a second exon may be defined as being at least 1%, 5%, 10%, 20%, 30%, 40%, 50%, 60%, 70%, 80%, 90% or 100% of the length of said exon. A region of a second exon may be called an identity region.

[0025] In one embodiment, the oligonucleotide of the invention is capable of binding to a region of exon U+1 (first exon) from a pre-mRNA, wherein a region of another exon D-1 (second exon) within the same pre-mRNA has at least 50% identity with said region of said (U+1) exon, wherein said oligonucleotide is for the skipping of said U+1 and said D-1 exons (and of additional exon(s) preferably located in between said first and said second exon) of said pre-mRNA, to obtain an in-frame transcript in which exons U and D are spliced together (e.g. for DMD preferably as in Table 1). An oligonucleotide of the invention is also identified herein as a compound. An oligonucleotide of the invention is preferably an antisense oligonucleotide (i.e. AON). An oligonucleotide is preferably for the skipping of said two exons (i.e. said first (U+1) and said second (D-1) exons) of said pre-mRNA, and wherein the resulting transcript (in which U is directly spliced to D) is in-frame (e.g. for DMD preferably as in Table 1). One may say that said oligonucleotide induces the skipping of said two exons in one single pre-mRNA. Optionally the skipping of additional exon(s) is induced wherein said additional exon(s) is/are preferably located in between said first and said second exons and the resulting transcript is in frame.

[0026] An oligonucleotide is more preferably for the skipping of said two exons (i.e. said first and said second exon), and the entire stretch of exons in between said first and said second exon, in said pre-mRNA, in order to remove any mutation within said stretch, and to obtain a transcript which is shorter but which has a restored open reading frame allowing protein production.

[0027] Without wishing to be bound by any theory, it is believed that due to the at least 50% sequence identity or similarity between said two exons, a single oligonucleotide of the invention is able to bind to and induce the skipping of both exons, and, preferably, the entire stretch of exons in between in order to obtain a shorter transcript, which is in frame. Said two exons may thus be adjacent in a pre-mRNA or may be separated by at least 1, 2, 3, 4, 5, 6, 7, 8, 9, 10, 11, 12, 13, 14, 15, 16, 17, 18, 19, 20, 21, 22, 23, 24, 25, 26, 27, 28, 29, 30, 31, 32, 33, 34, 35, 36, 37, 38, 39, 40, 41, 42, 43, 44, 45, 46, 47, 48, 49, or 50 exons. The region encompassing one or more exons present between said first and said second exons may also be called a stretch of (multiple) exons or a multiexon stretch. Preferably, the first exon of this multiexon stretch is the first exon identified earlier herein and the last exon of this multiexon stretch is the second exon identified earlier herein. An oligonucleotide of the invention may also be identified as an oligonucleotide which is able to induce the skipping of said two exons or the skipping of a stretch of (multiple) exons or the skipping of said multiexon stretch. In a preferred embodiment, skipping of both the first exon and the second exons is induced by using one single oligonucleotide of the invention, in a preferred embodiment, the skipping of more than one, more than 2, more than 3, more than 4, more than 5, more than 6, more than 7, more than 8, more than 9, more than 10, more than 11, more than 12, more than 13, more than 14, more than 15, more than 16, more than 17 exons, more than 18, more than 19, more than 20, more than 21, more than 22, more than 23, more than 24, more than 25, more than 26, more than 27, more than 28, more than 29, more than 30, more than 31, more than 32, more than 33, more than 34, more than 35, more than 36 more than 37, more than 38, more than 39, more than 40, more than 41, more than 42, more than 43, more than 44, more than 45, more than 46, more than 47, more than 48, more than 49, more than 50 exons using one single oligonucleotide is carried out and therefore this skipping of more than 1, 2, 3, 4, 5, 6, 7, 8, 9, 10, 11, 12, 13, 14, 15, 16, 17, 18, 19, 20, 21, 22, 23, 24, 25, 26, 27, 28, 29, 30, 31, 32, 33, 34, 35, 36, 37, 38, 39, 40, 41, 42, 43, 44, 45, 46, 47, 48, 49 or 50 exons is carried out, not using a mixture or cocktail of two or more distinct oligonucleotides, or not using two or more distinct oligonucleotides that may be linked with one or more linker(s), or not using a gene construct transcribing two or more distinct oligonucleotides. In an embodiment, it is therefore provided that the invention encompasses one single oligonucleotide and does not comprise two or more distinct oligonucleotides, said single oligonucleotide being capable of binding to said first and said second exons, and able of inducing the skipping of at least said first and said second exons within a single pre-mRNA as explained herein. In this context the skilled person understands that the word “single” does not refer to the number of molecules needed in order to induce exon skipping. Single refers to the sequence of an oligonucleotide: the invention encompasses one single oligonucleotide sequence and its use and does not comprise two or more distinct oligonucleotide sequences, said single oligonucleotide sequence being capable of binding to said first and said second exons and able of inducing the skipping of at least said first and said second exons within a single pre-mRNA as explained herein. This is the first invention allowing the skipping of more than one exon with only one single oligonucleotide in order to treat a disease caused by a (rare) mutation in a gene, provided that different exons in said gene comprise regions that have at least 50% sequence identity.

[0028] An oligonucleotide of the invention is preferably used as a part of therapy based on RNA-modulating activity as later herein defined. Depending on the identity of the transcript wherein the first and second exons are present, one may design an oligonucleotide for preventing, treating or delaying a given disease.

[0029] It has been shown that targeting two exons within a single pre-mRNA with a single oligonucleotide capable of binding to both exons, results in mRNA lacking the targeted exons and, additionally, the entire stretch of exons in between. An advantage of such single oligonucleotide as defined herein is that defects caused by different mutations within this multiexon stretch can be treated. If one would choose to use two or more distinct oligonucleotides to induce the skipping of two or more exons, one should for example take into account that each oligonucleotide may have its own PK profile and that thus conditions would have to be found wherein each of them will be similarly present in a same cell. Therefore another advantage of using only one single oligonucleotide able to bind to two different exons as identified above, is that production, toxicity, dose finding and clinical testing is majorly facilitated as these can be reduced to the straightforward production and testing of one single compound.

[0030] Below additional features of the oligonucleotide of the invention are defined.

[0031] Within the context of the invention, in a preferred embodiment, an oligonucleotide is capable of binding to, targeting, hybridizing to, is reverse-complementary with and/or is capable of inhibiting the function of at least one splicing regulatory sequence within at least said first exon and/or said second exon and/or is affecting the structure of at least said first exon and/or said second exon:

wherein said oligonucleotide comprises a sequence that is capable of binding to, targeting, hybridizing to and/or is reverse-complementary to a binding site for a serine-arginine (SR) protein in said first and/or second exon and/or
wherein said oligonucleotide is capable of binding to, targeting, hybridizing and/or is reverse-complementary to an exonic splicing enhancer (ESE), exon recognition sequence (ERS), and/or exonic splicing silencer (ESS) in said first and/or second exon.

[0032] More preferably, said oligonucleotide which is capable of binding to, targeting, hybridizing to and/or being reverse-complementary to a region of a first pre-mRNA exon and/or to a region of a second pre-mRNA exon is capable of specifically inhibiting at least one splicing regulatory sequence and/or affecting the structure of at least said first and/or second exon in said pre-mRNA. Interfering with such splicing regulatory sequences and/or structures has the advantage that such elements are located within the exon. By providing such an oligonucleotide as defined herein, it is possible to effectively mask at least said first and second exon, and preferably the entire stretch of exons in between, from the splicing apparatus. The failure of the splicing apparatus to recognize these exons thus leads to the skipping or exclusion of these exons from the final mRNA. This embodiment focuses on coding sequences only. It is thought that this allows the method to be more specific and thus reliable. The reverse complementarity of said oligonucleotide to said region of said first and/or second exon of a pre-mRNA is preferably at least 45%, 50%, 55%, 60%, 65%, 70%, 75%, 80%, 85%, 90%, 95% or 100%.

[0033] Therefore, the present invention relates to an antisense oligonucleotide for use as a medicament for preventing, delaying, ameliorating and/or treating a disease in a subject, wherein said oligonucleotide is capable of binding to a region of a first exon and a region of a second exon, wherein said region of said second exon has at least 50% identity with said region of said first exon,

wherein said first and said second exons are within a same pre-mRNA in said subject,
wherein said binding results in the skipping of said first exon and said second exon and preferably in the skipping of a multi-exon stretch starting with said first exon and encompassing one or more exons present between said first and said second exons and at the most in the skipping of the entire stretch of exons in between said first and said second exons, and
wherein an in-frame transcript is obtained allowing production of a functional or semi-functional protein.

[0034] Preferably, as explained herein, said oligonucleotide is capable of inducing the skipping of the entire stretch of exons between said first exon and said second exon.

[0035] More preferably, as explained herein said binding of said oligonucleotide is capable of interfering with at least one splicing regulatory sequence in said regions of said first and second exons and/or with the secondary structure of said first and/or said second exons and/or with the secondary structure encompassing at least said first and/or said second exons in said pre-mRNA. Preferred splicing regulatory sequences are presented later herein.

[0036] One preferred embodiment therefore relates to an oligonucleotide of the invention that is capable of binding to a region of a first exon from a pre-mRNA and/or to a region or a second exon within the same pre-mRNA, wherein said region of said second exon within the same pre-mRNA has at least 50% identity with said region of said first exon (e.g. for DMD preferably as in Table 2), wherein said oligonucleotide is capable of inducing the skipping of said first and second exons of said pre-mRNA; resulting in a transcript which is in frame (e.g. for DMD preferably as in Table 1 or 6). Said oligonucleotide providing said individual with a functional or semi-functional protein, and said oligonucleotide further comprising:
[0037] a sequence Which is capable of binding to, targeting, hybridizing to and/or is reverse-complementary to a region of a first and/or second pre-mRNA exon that is hybridized to another part of a first and/or second pre-mRNA exon (closed structure), and/or
[0038] a sequence which is capable of binding to, targeting, hybridizing to and/or is reverse-complementary to a region of said first and/or second pre-mRNA exon that is not hybridized in said pre-mRNA (open structure).

[0039] For this embodiment, reference is made to WO 2004/083446 patent application. RNA molecules exhibit strong secondary structures, mostly due to base pairing of reverse-complementary or partly reverse-complementary stretches within the same RNA. It has long since been thought that structures in the RNA play a role in the function of the RNA. Without being bound by theory, it is believed that the secondary structure of the RNA of an exon plays a role in structuring the splicing process. Through its structure, an exon is recognized as a part that needs to be included in the mRNA. In an embodiment, an oligonucleotide is capable of interfering with the structure of at least said first exon and probably also said second exon and possibly also the stretch of exons in between, and therefore capable of interfering with the splicing of said first and probably also said second exon and possibly also the stretch of exons in between, by masking said exons from the splicing apparatus and thereby resulting in the skipping of said exons. Without being bound by theory, it is thought that the overlap with an open structure improves the invasion efficiency of an oligonucleotide (i.e. increases the efficiency with which the oligonucleotide can enter the structure), whereas the overlap with the closed structure subsequently increases the efficiency of interfering with the secondary structure of the RNA of the exon. It is found that the length of the partial reverse-complementarity to both the closed and the open structure is not extremely restricted. We have observed high efficiencies with an oligonucleotide with variable lengths of reverse-complementarity in either structure. The term reverse-complementarity is used herein to refer to a stretch of nucleic acids that can hybridize to another stretch of nucleic acids under physiological conditions. Hybridization conditions are later defined herein. It is thus not absolutely required that all the bases in the region of reverse-complementarity are capable of pairing with bases in the opposing strand. For instance, when designing an oligonucleotide, one may want to incorporate for instance one or more residues that do not base pair with the bases on the reverse-complementary strand. Mismatches may to some extent be allowed, if under the circumstances in the cell, the stretch of nucleotides is still capable of hybridizing to the reverse-complementary part. In the context of this invention the presence of a mismatch in the oligonucleotide of the invention is preferred since in an embodiment, said oligonucleotide is at least 45%, 50%, 55%, 60%, 65%, 70%, 75%, 80%, 85%, 90%, 95%, 100% reverse complementary to a region of a first exon and/or to a region of a second exon. The presence of a mismatch in said oligonucleotide is a preferred characteristic of the invention since said oligonucleotide is able to bind to a region of said first and to a region of said second exon as earlier identified herein.

[0040] Other advantages of allowing the presence of a mismatch in an antisense oligonucleotide of the invention are defined herein and are similar to those provided by the presence of an inosine (hypoxanthine) and/or a universal base and/or a degenerate base and/or a nucleotide containing a base able to form a wobble base pair: avoid the presence of a CpG, avoid or decrease a potential multimerisation or aggregation, avoid quadruplex structures, allow to design an oligonucleotide with improved RNA binding kinetics and/or thermodynamic properties.

[0041] Preferably, the reverse-complementarity of the oligonucleotide to the region of identity between said first and/or second exon is from 45% to 65%, 50% to 75%, but more preferably from 65% to 100% or from 70% to 90% or from 75% to 85%, or from 80% to 95%. In general this allows for 1, 2, 3, 4, 5, 6, 7, 8, 9, 10, or 11 mismatch(es) in an oligonucleotide of 20 nucleotides. Therefore, we may have 1, 2, 3, 4, 5, 6, 7, 8, 9, 10, 11, 12, 13, 14, 15, 16, 18, 19, 20, 21, or 22 mismatch(es) in an oligonucleotide of 40 nucleotides. Preferably, less than 14 mismatches are present in an oligonucleotide of 40 nucleotides. The number of mismatches is such that an oligonucletide of the invention is still able of binding to, hybridizing to, targeting a region of said first exon and to a region of said second exon, thereby inducing the skipping of at least said first and said second exons and inducing the production of an in frame transcript as explained herein. Preferably the production of an in frame transcript is obtained with at least 5% efficiency using at least 100 nM of said oligonucleotide to transfect a relevant cell culture in vitro as earlier explained herein.

[0042] It should be pointed out that the invention encompasses an oligonucleotide that does not have any mismatch with a region of a first exon and that may have 1, 2, 3, 4, 5, 6, 7, 8, 9, 10, 11, 12, 13, 14, 15, 16, 18, 19, 20, 21, or 22 mismatches with the corresponding region of a second exon as defined herein. However, the invention also encompasses an oligonucleotide that does not have any mismatch with a region of a second exon and that may have 1, 2, 3, 4, 5, 6, 7, 8, 9, 10, 11, 12, 13, 14, 15, 16, 18, 19, 20, 21, or 22 mismatches with the corresponding region of a first exon as defined herein. Finally, the invention encompasses an oligonucleotide that may have 1, 2, 3, 4, 5, 6, 7, 8, 10, 11, 12, 13, 14, 15, 16, 18, 19, 20, 21, or mismatches with a region of a first exon and that may have 22, 21, 20, 19, 18, 17, 16, 15, 14, 13, 12, 11, 10, 9, 8, 7, 6, 5, 4, 3, 2, 1 mismatches with the corresponding region of a second exon as defined herein. Here again, it is to be understood that the number of mismatches in an oligonucleotide of the invention is such that said oligonucleotide is still able of binding to, hybridizing to, targeting a region of said first exon and a region of said second exon as explained herein.

[0043] An oligonucleotide of the invention preferably does not cross a gap in the alignment of a region of a first exon and a region of a second exon as identified herein. The alignment is preferably carried out using the online tool EMBOSS Matcher as explained earlier herein. In specific cases however an oligonucleotide of the invention may need to cross a gap, as earlier mentioned herein. Said gap is preferably just one gap. Said gap is preferably spanning less than 3 nucleotides, most preferably only one nucleotide. The number and length of gaps is such that an oligonucleotide of the invention is still able of binding to, hybridizing to, targeting a region of said first exon and a region of said second exon, thereby inducing the skipping of at least said first and said second exons and inducing the production of an in frame transcript as explained herein.

[0044] The structure (i.e. open and closed structures) is best analyzed in the context of the pre-mRNA wherein the exons reside. Such structure may be analyzed in the actual RNA. However, it is currently possible to predict the secondary structure of an RNA molecule (at lowest energy costs) quite well using structure-modeling programs. A non-limiting example of a suitable program is Mfold web server (Zuker, M.).

[0045] A person skilled in the art will be able to predict, with suitable reproducibility, a likely structure of an exon, given a nucleotide sequence. Best predictions are obtained when providing such modeling programs with both said exon and flanking intron sequences. It is typically not necessary to model the structure of the entire pre-mRNA.

[0046] The annealing of an oligonucleotide of the invention may affect the local folding or 3D structure or conformation of the target RNA (i.e. of the region encompassing at least the first and/or second exons). The different conformation may result in the disruption of a structure recognized by the splicing machinery. However, when potential (cryptic) splice acceptor and/or donor sequences are present within the first and/or second targeted exon, occasionally a new structure is generated defining a different (neo) exon, i.e. with a different 5′ end, a different 3′ end, or both. This type of activity is within the scope of the present invention as the targeted exon is excluded from the mRNA, The presence of a new exon, containing part of said first and/or second targeted exon, in the mRNA does not alter the fact that the targeted exon, as such, is excluded. The inclusion of a neo-exon can be seen as a side effect which occurs only occasionally, There are two possibilities when exon skipping is used to restore (part of) an open reading frame of a transcript that is disrupted as a result of a mutation. One is that the neo-exon is functional in the restoration of the reading frame, whereas in the other case the reading frame is not restored. When selecting an oligonucleotide for restoring an open reading frame by means of multiple exon-skipping it is of course clear that under these conditions only those oligonucleotides are selected that indeed result in exon-skipping that restore the open reading flame of a given transcript, with or without a neo-exon.

[0047] Further in another preferred embodiment is provided an oligonucleotide of the invention that is capable of binding to a region of a first exon from a pre-mRNA and to a region of a second exon within the same pre-mRNA, wherein said region of said second exon has at least 50% identity with said region of said first exon (preferred regions for dystrophin exons are identified in Table 2 or Table 6), wherein said oligonucleotide is capable of inducing the skipping of said first and second exons of said pre-mRNA; resulting in a transcript which is in frame (for DMD preferably as in Table 1 or Table 6). Said oligonucleotide providing said individual with a functional or semi-functional protein, and said oligonucleotide further comprising: a sequence that is capable of binding to, targeting, hybridizing to, is reverse-complementary to and/or is able to inhibit a function of one or more binding sites for a serine-arginine (SR) protein in RNA of an exon of a pre-mRNA.

[0048] In WO 2006/112705 patent application we have disclosed the presence of a correlation between the effectiveness of an exon-internal antisense oligonucleotide (AON) in inducing exon skipping and the presence of a putative SR binding site in the target pre-mRNA site of said AON. Therefore, in one embodiment, said oligonucleotide as defined herein is generated comprising determining one or more (putative) binding sites for an SR protein in RNA of said first and/or said exon and producing a corresponding oligonucleotide that is capable of binding to, targeting, hybridizing to and/or is reverse-complementary to said RNA and that at least partly overlaps said (putative) binding site. The term “at least partly overlaps” is defined herein as to comprise an overlap of only a single nucleotide of an SR binding site as well as multiple nucleotides of one or more said binding sites as well as a complete overlap of one or more said binding sites. This embodiment preferably further comprises determining from a secondary structure of a first and/or second exon, a region that is hybridized to another part of said first and/or second exon (closed structure) and a region that is not hybridized in said structure (open structure), and subsequently generating an oligonucleotide that at least partly overlaps one or more said (putative) binding sites and that overlaps at least part of said closed structure and overlaps at least part of said open structure and with binding to, targeting, hybridizing with and/or being reverse-complementary to both first and second exons. In this way we increase the chance of obtaining an oligonucleotide that is capable of interfering with the inclusion of said first and second exons, and if applicable the entire stretch of exons in between, from the pre-mRNA into mRNA. Without wishing to be bound by any theory it is currently thought that use of an oligonucleotide directed to an SR protein binding site results in (at least partly) impairing of the binding of an SR protein to said binding site which results in disrupted or impaired splicing.

[0049] Preferably, a region of a first exon and/or a region of a second exon within the same pre-mRNA an oligonucleotide of the invention is capable of binding to, comprises an open/closed structure and/or an SR protein binding site, more preferably said open/closed structure and said SR protein binding site partly overlap and even more preferred said open/closed structure completely overlaps an SR protein binding site or an SR protein binding site completely overlaps an open/closed structure. This allows for a further improved disruption of exon inclusion.

[0050] Besides consensus splice sites sequences, many (if not all) exons contain splicing regulatory sequences such as exonic splicing enhancer (ESE) sequences to facilitate the recognition of genuine splice sites by the spliceosome (Cartegni L, et al. 2002; and Cartegni L, et al. 2003). A subgroup of splicing factors, called the SR proteins, can bind to these ESEs and recruit other splicing factors, such as U1 and U2AF to (weakly defined) splice sites. The binding sites of the four most abundant SR proteins (SF2/ASF, SC35, SRp40 and SRp55) have been analyzed in detail (Cartegni L, et al. 2002) and Cartegni L, et al. 2003). There is a correlation between the effectiveness of an oligonucleotide and the presence/absence of an SF2/ASF, SC35, SRp40 and SRp55 binding site in a part of a first exon bound by, hybridized by and/or targeted by said oligonucleotide. In a preferred embodiment, the invention thus provides an oligonucleotide, which binds to, hybridizes with, targets and/or is reverse-complementary to a binding site for a SR protein. Preferably, said SR protein is SF2/ASF or SC35, SRp40 or SRp55. In one embodiment the oligonucleotide binds to, hybridizes with, targets and/or is reverse-complementary to a binding site for a SF2/ASF, SC35, SRp40, or SRp55 protein in a first exon and to a binding site for a different SF2/ASF, SC35, SRp40, or SRp55 protein in a second exon. In a more preferred embodiment the oligonucleotide binds to, hybridizes with, targets and/or is reverse-complementary to a binding site for a SF2/ASF, SC35, SRp40, or SRp55 protein in a first exon and to a corresponding binding site for a similar SF2/ASF, SC35, SRp40, or SRp55 protein in a, second exon.

[0051] In one embodiment a patient is provided with a functional or semi-functional protein by using an oligonucleotide which is capable of binding, targeting a regulatory RNA sequence present in a first and/or second exon which is required for the correct splicing of said exon(s) in a transcript, Several cis-acting RNA sequences are required for the correct splicing of exons in a transcript. In particular, supplementary elements such as exonic splicing enhancers (ESEs) are identified to regulate specific and efficient splicing of constitutive and alternative exons. Using a compound comprising an oligonucleotide that binds to or is capable of binding to one of the supplementary elements in said first and/or second exon(s), their regulatory function is disturbed so that the exons are skipped. Hence, in one preferred embodiment, an oligonucleotide of the invention is capable of binding to a region of a first exon from a pre-mRNA and to region of a second exon within the same pre-mRNA wherein said region of said second exon has at least 50% identity with said region of said first exon, wherein said oligonucleotide is capable of inducing the skipping of said first and second exons of said pre-mRNA; wherein said region of said first exon and/or said region of said second exon comprises an exonic splicing enhancer (ESE), an exon recognition sequence (ERS), and/or a splicing enhancer sequence (SES) and/or wherein said oligonucleotide is capable of binding to, targeting, is capable of inhibiting and/or is reverse-complementary to said exonic splicing enhancer (ESE), an exon recognition sequence (ERS), and/or a splicing enhancer sequence (SES).

[0052] Below preferred chemistries of the oligonucleotide of the invention are disclosed.

[0053] An oligonucleotide is commonly known as an oligomer that has basic hybridization characteristics similar to natural nucleic acids. Hybridization has been defined in the part dedicated to the definitions at the end of the description of the invention. Within this application, the term oligonucleotide and oligomer are used interchangeably. Different types of nucleosides may be used to generate said oligonucleotide of the invention. An oligonucleotide may comprise at least one modified internucleoside linkage and/or at least one sugar modification and/or at least one base modification, compared to a naturally occurring ribonucleotide- or deoxyribonucleotide-based oligonucleotide.

[0054] A “modified internucleoside linkage” indicates the presence of a modified version of the phosphodiester as naturally occurring in RNA and DNA. Examples of internucleoside linkage modifications, which are compatible with the present invention, are phosphorothioate (PS), chirally pure phosphorothioate, phosphorodithioate (PS2), phosphonoacetate (PACE), phosphonoacetamide (PACA), thiophosphonoacetate, thiophosphonoacetamide, phosphorothioate prodrug, H-phosphonate, methyl phosphonate, methyl phosphonothioate, methyl phosphate, methyl phosphorothioate, ethyl phosphate, ethyl phosphorothioate, boranophosphate, boranophosphorothioate, methyl boranophosphate, methyl boranophosphorothioate, methyl boranophosphonate, methyl boranophosphonothioate, and their derivatives. Another modification includes phosphoramidite, phosphoramidate, N3→P5′ phosphoramidate, phosphorodiamidate, phosphorthioamidate, phosphorothiodiamidate, sulfamate, dimethylenesulfoxide, sulfonate, methyleneimino oxalyl and thioacetamido nucleic acid (TANA); and their derivatives. Depending on its length, an oligonucleotide of the invention may comprise 1, 2, 3, 4, 5, 6, 7, 8, 9, 10, 11, 12, 13, 14, 15, 16, 17, 18, 19, 20, 21, 22, 23, 24, 25, 26, 27, 28, 29, 30, 31, 32, 33, 34, 35, 36, 37, 38 or 39 backbone modifications. It is also encompassed by the invention to introduce more than one distinct backbone modification in said oligonucleotide.

[0055] Also encompassed within the invention is an oligonucleotide that comprises a internucleoside linkage that may be different in respect of the atoms of the nucleosides that are connect to each other, when compared to the naturally occurring internucleoside linkage. In this respect, the oligonucleotide of the invention may comprise at least one internucleoside linkage construed as 3′-3′, 5′-5′, 2′-3′, linked monomers. Position numbering might differ for other chemistries, but the idea remains within the scope of the invention. In one embodiment, the oligonucleotide of the invention comprises at least one phosphorothioate modification. In a more preferred embodiment, an oligonucleotide of the invention is fully phosphorothioate modified.

[0056] A “sugar modification” indicates the presence of a modified version of the ribosyl moiety as naturally occurring in RNA and DNA (i.e., the furanosyl moiety), such as bicyclic sugars, tetrahydropyrans, morpholinos, 2′-modified sugars, 3′-modified sugars, 4′-modified sugars, 5′-modified sugars, and 4′-substituted sugars. Examples of suitable sugar modifications include, but are not limited to, 2′-O-modified RNA nucleotide residues, such as 2′-O-alkyl or 2′-O-(substituted)alkyl e.g. 2′-O-methyl, 2′-O-(2-cyanoethyl), 2′-O-(2-methoxy)ethyl (2′-MOE), 2′-O-(2-thiomethyl)ethyl, 2′-O-butyryl, 2′-O-propargyl, 2′-O-allyl, 2′-O-(2-amino)propyl, 2′O-(2-(dimethylamino)propyl), 2′-O-(3-amino)propyl, 2′-O-(3-(dimethylamino)propyl), 2′-O-(2-amino)ethyl, 2′-O-(3-guanidino)propyl (as described in patent application WO 2013/061295, University of the Witwatersrand, incorporated here in its entirety by reference), 2′-O-(2-(dimethylamino)ethyl); 2″-O-(haloalkoxy)methyl (Arai K. et al.) e.g. 2′-O-(2-chloroethoxy)methyl (MCEM), 2′-O-(2,2-dichloroethoxyl)methyl (DCEM); 2′-O-alkoxycarbonyl e.g. 2′-0-[2-(methoxycarbonyl)ethyl] (MOUE), 2′-O-[2-(N-methylcarbamoyl)ethyl](NICE), 2′-O-[2-(N,N-dimethylcarbamoyl)ethyl] (DMCE); 2′-O-[methylaminocarbonyl]methyl; 2′-azido; 2′-amino and 2′-substituted amino; 2′-halo e.g. 2′-F, FANA (2′-F arabinosyl nucleic acid); carbasugar and azasugar modifications; 3′-O-alkyl e.g. 3′-O-methyl, 3′-O-butyryl, 3′-O-propargyl; 2′,3′-dideoxy; and their derivatives. Another sugar modification includes “bridged” or “bicylic” nucleic acid (BNA) modified sugar moieties, such as found in e.g. locked nucleic acid (LNA), xylo-LNA, α-L-LNA, β-D-LNZ cEt (2′-0,4′-C constrained ethyl) LNA, cMOEt (2′-O,4′-C constrained methoxyethyl) LNA, ethylene-bridged nucleic acid (ENA), BNA^{NC}[N-Me] (as described in Chem. Commun. 2007, 3765-3767 Kazuyuki Miyashita et al. which is incorporated here in its entirety by reference), CRNs as described in patent application WO 2013/036868 (Marina Biotech, incorporated here in its entirety by reference); unlocked nucleic acid (UNA) or other acyclic nucleosides such as described in US patent application US 2013/0130378 (Alnylam Pharmaceuticals), incorporated here in its entirety by reference; 5′-methyl substituted BNAs (as described in U.S. patent application Ser. No. 13/530,218, which is incorporated in its entirety by reference); cyclohexenyl nucleic acid (CeNA), altriol nucleic acid (ANA), hexitol nucleic acid (HNA), fluorinated RNA (F-HNA), pyranosyl-RNA (p-RNA), 3′-deoxypyranosyl-DNA (p-DNA); or other modified sugar moieties, such as morpholino (PMO), cationic morpholino (PMOPlus), PMO-X; tricycloDNA; tricyclo-PS-DNA; and their derivatives. BNA derivatives are for example described in WO 2011/097641, which is incorporated in its entirety by reference. Examples of PMO-X are described in WO2011150408, which is incorporated here in its entirety by reference. Depending on its length, an oligonucleotide of the invention may comprise 1, 2, 3, 4, 5, 6, 7, 8, 9, 10, 11, 12, 13, 14, 15, 16, 17, 18, 19, 20, 21, 22, 23, 24, 25, 26, 27, 28, 29, 30, 31, 32, 33, 34, 35, 36, 37, 38, 39 or 40 sugar modifications. It is also encompassed by the invention to introduce more than one distinct sugar modification in said oligonucleotide.

[0057] In one embodiment, the oligonucleotide according to the invention comprises at least one sugar modification selected from 2′-O-methyl, 2′-O-(2-methoxy)ethyl, 2′-F, morpholino, a bridged nucleotide or BNA, or the oligonucleotide comprises both bridged nucleotides and 2′-deoxy nucleotides (DNA/DNA mixmers). Oligonucleotides comprising a 2′-fluoro (2-′F) nucleotide have been shown to be able to recruit the interleukin enhancer-binding factor 2 and 3 (ILF2/3) and is thereby able to induce exon skipping in the targeted pre-mRNA (Rigo F, et al, WO2011/097614).

[0058] In another embodiment, an oligonucleotide as defined herein comprises or consists of an LNA or a derivative thereof. More preferably, the oligonucleotide according to the invention is modified over its full length with a sugar modification selected from 2′-O-methyl, 2′-O-(2-methoxyl)ethyl, morpholino, bridged nucleic acid (BNA) or BNA/DNA mixmer. In a more preferred embodiment, an oligonucleotide of the invention is fully 2′-O-methyl modified. In a preferred embodiment, the oligonucleotide of the invention comprises at least one sugar modification and at least one modified internucleoside linkage. Such modifications include peptide-base nucleic acid (PNA), boron-cluster modified PNA, pyrrolidine-based oxy-peptide nucleic acid (POPNA), glycol- or glycerol-based nucleic acid (CNA), threose-based nucleic acid (TNA), acyclic threoninol-based nucleic acid (aTNA), morpholino-based oligonucleotides (PMO, PPM, PMO-X), cationic morpholino-based oligomers (PMOPlus, PMO-X), oligonucleotides with integrated bases and backbones (ONIBs), pyrrolidine-amide oligonucleotides (POMs); and their derivatives. In a preferred embodiment, the oligonucleotide of the invention comprises a peptide nucleic acid backbone and/or a morpholino phosphorodiamidate backbone or a derivative thereof. In a more preferred embodiment, the oligonucleotide according to the invention is 2′-O-methyl phosphorothioate modified, i.e. comprises at least one 2′-O-methyl phosphorothioate modification, preferably the oligonucleotide according to the invention is fully 2′-O-methyl phosphorothioate modified, Preferably, the 2′-O-methyl phosphorothioate modified oligonucleotide or the fully 2′-O-methyl phosphorothioate modified oligonucleotide is an RNA oligonucleotide.

[0059] The term “base modification” or “modified base” as identified herein refers to the modification of a naturally occurring base in RNA and/or DNA (i.e. pyrimidine or purine base) or to de novo synthesized bases. Such de novo synthesized base could be qualified as “modified” by comparison to an existing base.

[0060] In addition to the modifications described above, the oligonucleotide of the invention may comprise further modifications such as different types of nucleic acid nucleotide residues or nucleotides as described below. Different types of nucleic acid nucleotide residues may be used to generate an oligonucleotide of the invention. Said oligonucleotide may have at least one backbone, and/or sugar modification and/or at least one base modification compared to an RNA or DNA-based oligonucleotide.

[0061] An oligonucleotide may comprise the natural bases purines (adenine, guanine), or pyrimidines (cytosine, thymine, uracil) and/or modified bases as defined below. Within the context of the invention, a uracil may be replaced by a thymine.

[0062] A base modification includes a modified version of the natural purine and pyrimidine bases (e.g. adenine, uracil, guanine, cytosine, and thymine), such as hypoxanthine, orotic acid, agmatidine, lysidine, pseudouracil, pseudothymine, N1-methyl pseudouracil, 2-thiopyrimidine (e.g. 2-thiouracil, 2-thiothymine), 2,6-diaminopurine, G-clamp and its derivatives, 5-substituted pyrimidine (e.g. 5-halouracil, 5-methyluracil, 5-methylcytosine, 5-propynyluracil, 5-propynylcytosine, 5-aminomethyluracil, 5-hydroxymethyluracil, 5-aminomethylcytosine, 5-hydroxymethylcytosine, Super T), 5-octylpyrimidine, 5-thiophenepyrimidine, 5-octyn-1 ylprimidine, 5-ethynylpyrimidine, 5-(pyridylamine), 5 isobutyl, 5-phenyl as described in patent application US 2013/0131141 (RXi), incorporated here in its entirety by reference; 7-deazaguanine, 7-deazaadenine, 7-aza-2,6-diaminopurine, 8-aza-7-deazaguanine, 8-aza-7-deazaadenine, 8-aza-7-deaza-2,6-diaminopurine, Super G, Super A, and N4-ethylcytosine, or derivatives thereof; N2-cyclopentylguanine (cPent-G), N2-cyclopentyl-2-aminopurine (cPent-AP), and N2-propyl-2-aminopurine (Pr-AP), or derivatives thereof; and degenerate or universal bases, like 2,6-difluorotoluene or absent bases like abasic is sites (e.g., 1-deoxyribose, 1,2-dideoxyribose, 1-deoxy-2-O-methylribose; or pyrrolidine derivatives in which the ring oxygen has been replaced with nitrogen (azaribose)). Examples of derivatives of Super A, Super G and Super T can be found in U.S. Pat. No. 6,683,173 (Epoch Biosciences), which is incorporated here entirely by reference, cPent-G, cPent-AP and Pr-AP were shown to reduce immunostimulatory effects when incorporated in siRNA (Peacock H. et al.), and similar features were shown for pseudouracil and N1-methylpseudouracil (US patent application 2013/0123481, modeRNA Therapeutics, incorporated here entirely by reference). ‘Thymine’ and ‘5-methyluracil’ may be interchanged throughout the document. In analogy, ‘2,6-diaminopurine’ is identical to ‘2-aminoadenine’ and these terms may be interchanged throughout the document.

[0063] In a preferred embodiment, the oligonucleotide of the invention comprises at least one 5-methylcytosine and/or at least one 5-methyluracil and/or at least one 2,6-diaminopurine base, which is to be understood that at least one of the cytosine nucleobases of said oligonucleotide has been modified by substitution of the proton at the 5-position of the pyrimidine ring with a methyl group (i.e. a 5-methylcytosine), and/or that at least one of the uracil nucleobases of said oligonucleotide has been modified by substitution of the proton at the 5-position of the pyrimidine ring with a methyl group (i.e. a 5-methyluracil), and/or that at least one of the adenine nucleobases of said oligonucleotide has been modified by substitution of the proton at the 2-position with an amino group (i.e. a 2,6-diaminopurine), respectively. Within the context of the invention, the expression “the substitution of a proton with a methyl group in position 5 of the pyrimidine ring” may be replaced by the expression “the substitution of a pyrimidine with a 5-methylpyrimidine,” with pyrimidine referring to only uracil, only cytosine or both. Likewise, within the context of the invention, the expression “the substitution of a proton with an amino group in position 2 of adenine” may be replaced by the expression “the substitution of an adenine with a 2,6-diaminopurine.” If said oligonucleotide comprises 1, 2, 3, 4, 5, 6, 7, 8, 9 or more cytosines, uracils, and/or adenines, at least 1, 2, 3, 4, 5, 6, 7, 8, 9 or more cytosines, uracils and/or adenines respectively may have been modified this way. In a preferred embodiment, all cytosines, all uracils and/or all adenines have been modified this way or replaced by 5-methylcytosine, 5-methyluracil and/or 2,6-diaminopurine, respectively.

[0064] It was found that the presence of a 5-methylcytosine, a 5-methyluracil and/or a 2,6-diaminopurine in an oligonucleotide of the invention has a positive effect on at least one of the parameters or an improvement of at least one parameters of said oligonucleotide. In this context, parameters may include: binding affinity and/or kinetics, silencing activity, biostability, (intra-tissue) distribution, cellular uptake and/or trafficking, and/or immunogenicity of said oligonucleotide, as explained below.

[0065] Since several modifications as mentioned above are known to increase the Tm value and thus enhance binding of a certain nucleotide to its counterpart on its target mRNA, these modifications can be explored to promote the binding of an oligonucleotide of the invention with both a region of a first and of a second exon in the context of the invention. Since sequences of an oligonucleotide of the invention may not be 100% reverse complementary to a given region of a first exon and/or of a second exon, Tm-increasing modifications such as a bridged nucleotide or BNA (such as LNA) or a base modification selected from 5-methylpyrimidines and/or 2,6-diaminopurine may preferably be implemented at a nucleotide position that is reverse complementary to said first and/or said second region of said exons.

[0066] Binding affinity and/or binding or hybridisation kinetics depend on the AON's thermodynamic properties. These are at least in part determined by the melting temperature of said oligonucleotide (Tm; calculated with e.g. the oligonucleotide properties calculator (http://www.unc.edu/˜cail/biotool/oligo/index.html or http://eu.idtdna.com/analyzer/Applications/OligoAnalyzer/) for single stranded RNA using the basic Tm and the nearest neighbor model), and/or the free energy of the oligonucleotide-target exon complex (using RNA structure version 4.5 or RNA mfold version 3.5). If a Tm is increased, the exon skipping activity typically increases, but when a Tm is too high, the AON is expected to become less sequence-specific. An acceptable Tm and free energy depend on the sequence of the oligonucleotide. Therefore, it is difficult to give preferred ranges for each of these parameters.

[0067] An activity of an oligonucleotide of the invention is preferably defined as follows:
[0068] alleviating one or more symptom(s) of a disease associated with a mutation present in a first and/or in a second and/or a mutation present within the stretch starting at said first and ending at said second exon, preferably alleviating one or more symptom(s) of DMD or BMD; and/or
[0069] alleviating one or more characteristics of a cell from a patient, preferably a muscle cell from a patient; and/or
[0070] providing said individual with a functional or semi-functional protein, preferably′ a functional or semi-functional dystrophin protein; and/or
[0071] at least in part decreasing the production of an aberrant protein in said individual, preferably at least in part decreasing the production of an aberrant dystrophin protein in said individual. Each of these features and assays for assessing them has been defined later herein.

[0072] A preferred oligonucleotide of the invention, comprising a 5-methylcytosine and/or a 5-methyluracil and/or a 2,6-diaminopurine base is expected to exhibit an increased activity by comparison to the corresponding activity of an oligonucleotide without any 5-methylcytosine, without any 5-methyluracil and without any 2,6-diaminopurine base. This difference in terms of activity may be of at least 1%, 5%, 10%, 15%, 20%, 25%, 30%, 35%, 40%, 45%, 50%, 55%, 60%, 65%, 70%, 75%, 80%, 85%, 90%, 95%, or 100%. Biodistribution and biostability are preferably at least in part determined by a validated hybridization ligation assay adapted from Yu et al., 2002. In an embodiment, plasma or homogenised tissue samples are incubated with a specific capture oligonucleotide probe. After separation, a DIG-labeled oligonucleotide is ligated to the complex and detection followed using an anti-DIG antibody--linked peroxidase. Non-compartmental pharmacokinetic analysis is performed using WINNONLIN software package (model 200, version 5.2, Pharsight, Mountainview, Calif.), Levels of AON (ug) per mL plasma or mL tissue are monitored over time to assess area under the curve (AUC), peak concentration (Cmax), time to peak concentration (Tmax), terminal half-life and absorption lag time (tlag). Such a preferred assay has been disclosed in the experimental part, oligonucleotide may stimulate an innate immune response by activating the Toll-like receptors (TLR), including TLR9 and TLR7 (Krieg A. M., et al., 1995). The activation of TLR9 typically occurs due to the presence of non-methylated CO sequences present in oligodeoxynucleotides (ODNs), by mimicking bacterial DNA which activates the innate immune system through TLR9-mediated cytokine release. The 2′-O-methyl modification may however markedly reduce such possible effect. TLR7 has been described to recognize uracil repeats in RNA (Diebold S. S., et al., 2006).

[0073] The activation of TLR9 and TLR7 results in a set of coordinated immune responses that include innate immunity (macrophages, dendritic cells (DC), and NK cells) (Krieg A. M., et al., 1995; Krieg A. M., et al 2000). Several chemo- and cytokines, such as IP-10, TNFα, IL-6, MCP-1 and IFNα (Wagner H., et al. 1999; Popovic P. J., et al., 2006) have been implicated in this process. The inflammatory cytokines attract additional defensive cells from the blood, such as T and B cells. The levels of these cytokines can be investigated by in vitro testing. In short, human whole blood is incubated with increasing concentrations of oligonucleotides after which the levels of the cytokines are determined by standard commercially available ELISA kits. A decrease in immunogenicity preferably corresponds to a detectable decrease of concentration of at least one of the cytokines mentioned above by comparison to the concentration of corresponding cytokine in an assay in a cell treated with an oligonucleotide comprising at least one 5-methylcytosine and/or 5-methyluracil, and/or 2,6-diaminopurine compared to a cell treated with a corresponding oligonucleotide having no 5-methylcytosines, 5-methyluracils, or 2,6-diaminopurines.

[0074] Accordingly, a preferred oligonucleotide of the invention has an improved parameter, such as an acceptable or a decreased immunogenicity and/or a better biodistribution and/or acceptable or improved RNA binding kinetics and/or thermodynamic properties by comparison to a corresponding oligonucleotide without a 5-methylcytosine, without a 5-methyluracil and without a 2,6-diaminopurine. Each of these parameters could be assessed using assays known to the skilled person,

[0075] A preferred oligonucleotide of the invention comprises or consists of an RNA molecule or a modified RNA molecule. In a preferred embodiment, an oligonucleotide is single stranded. The skilled person will understand that it is however possible that a single stranded oligonucleotide may form an internal double stranded structure. However, this oligonucleotide is still named a single stranded oligonucleotide in the context of this invention. A single stranded oligonucleotide has several advantages compared to a double stranded siRNA oligonucleotide: (i) its synthesis is expected to be easier than two complementary siRNA strands; (ii) there is a wider range of chemical modifications possible to enhance uptake in cells, a better (physiological) stability and to decrease potential generic adverse effects; (iii) siRNAs have a higher potential for non-specific effects (including off-target genes) and exaggerated pharmacology (e.g. less control possible of effectiveness and selectivity by treatment schedule or dose) and (iv) siRNAs are less likely to act in the nucleus and cannot be directed against introns.

[0076] In another embodiment, an oligonucleotide of the invention comprises an abasic site or an abasic monomer. Within the context of the invention, such monomer may be called an abasic site or an abasic monomer. An abasic monomer is a nucleotide residue or building block that lacks a nucleobase by comparison to a corresponding nucleotide residue comprising a nucleobase. Within the invention, an abasic monomer is thus a building block part of an oligonucleotide but lacking a nucleobase. Such abasic monomer may be present or linked or attached or conjugated to a free terminus of an oligonucleotide.

[0077] In a more preferred embodiment, an oligonucleotide of the invention comprises 1-10 or ore abasic monomers. Therefore, 1, 2, 3, 4, 5, 6, 7, 8, 9, 10 or more abasic monomers may be present in an oligonucleotide of the invention.

[0078] An abasic monomer may be of any type known and conceivable by the skilled person, ion-limiting examples of which are depicted below:

[chemical structure]

[0079] Herein, R₁ and R₂ are independently H, an oligonucleotide or other abasic site(s), provided that not both R₁ and R₂ are H and R₁ and R₂ are not both an oligonucleotide. An abasic monomer(s) can be attached to either or both termini of the oligonucleotide as specified before. It should be noted that an oligonucleotide attached to one or two an abasic site(s) or abasic monomer(s) may comprise less than 10 nucleotides. In this respect, the oligonucleotide according to the invention may comprise at least 10 nucleotides, optionally including one or more abasic sites or abasic monomers at one or both termini. Other examples of abasic sites that are encompassed by the invention are described in US patent application 2013/013378 (Alnylam Pharmaceuticals), incorporated here in its entirety by reference.

[0080] Depending on its length an oligonucleotide of the invention may comprise 1, 2, 3, 4, 5, 6, 7, 8, 9, 10, 11, 12, 13, 14, 15, 16, 17, 18, 19, 20, 21, 22, 23, 24, 25, 26, 27, 28, 29, 30, 31, 32, 33, 34, 35, 36, 37, 38, 39 or 40 base modifications. It is also encompassed by the invention to introduce more than one distinct base modification in said oligonucleotide.

[0081] Thus, in one embodiment the oligonucleotide according to the invention comprises:
[0082] (a) at least one base modification selected from 2-thiouracil, 2-thiothymine, methylcytosine, 5-methyluracil, thymine, 2,6-diaminopurinc; and/or
[0083] (b) at least one sugar modification selected from 2′-O-methyl, 2′-O-(2-methoxy)ethyl, 2′-O-deoxy (DNA), 2′-F, morpholino, a bridged nucleotide or DNA, or the oligonucleotide comprises both bridged nucleotides and 2′-deoxy modified nucleotides (BNA/DNA mixmers); and/or
[0084] (c) at least one backbone modification selected from phosphorothioate or phosphorodiamidate.

[0085] In another embodiment the oligonucleotide according to the invention comprises:
[0086] (a) at least one base modification selected from 5-methylpyrimidine and 2,6-diaminopurine; and/or
[0087] (b) at least one sugar modification, which is 2′-O-methyl; and/or
[0088] (c) at least one backbone modification, which is phosphorothioate.

[0089] In an embodiment, an oligonucleotide of the invention comprises at least one modification compared to a naturally occurring ribonucleotide- or deoxyribonucleotide-based oligonucleotide, more preferably
[0090] (a) at least one base modification, preferably selected from 2-thiouracil, 2-thiothymine, 5-methylcytosine, 5-methyluracil, thymine, 2,6-diaminopurine, more preferably selected from 5-methylpyrimidine and 2,6-diaminopurine; and/or
[0091] (b) at least one sugar modification, preferably selected from 2′-O-methyl, 2′-O-(2-methoxyl)ethyl, 2′-O-deoxy (DNA), 2′-F, morpholino, a bridged nucleotide or BNA, or the oligonucleotide comprises both bridged nucleotides and 2′-deoxy modified nucleotides (BNA/DNA mixmers), more preferably the sugar modification is 2′-O-methyl; and/or
[0092] (c) at least one backbone modification, preferably selected from phosphorothioate or phosphorodiamidate, more preferably′ the backbone modification is phosphorothioate.

[0093] Thus, an oligonucleotide according to this embodiment of the invention comprises a base modification (a) and no sugar modification (b) and no backbone modification (c). Another preferred oligonucleotide according to this aspect of the invention comprises a sugar modification (b) and no base modification (a) and no backbone modification (c). Another preferred oligonucleotide according to this aspect of the invention comprises a backbone modification (c) and no base modification (a.) and no sugar modification (b). Also oligonucleotides having none of the above-mentioned modifications are understood to be covered by the present invention, as well as oligonucleotides comprising two, Le, (a) and (b), (a) and (c) and/or (b) and (c), or all three of the modifications (a), (b) and (c), as defined above.

[0094] In a preferred embodiment, the oligonucleotide according to the invention is modified over its entire length with one or more of the same modification, selected from (a) one of the base modifications; and/or (b) one of the sugar modifications; and/or (c) one of the backbone modifications.

[0095] With the advent of nucleic acid mimicking technology, it has become possible to generate molecules that have a similar, preferably the same hybridization characteristics in kind not necessarily in amount as nucleic acid itself. Such functional equivalents are of course also suitable for use in the invention.

[0096] In another preferred embodiment, an oligonucleotide comprises an inosine, a hypoxanthine, a universal base, a degenerate base and/or a nucleoside or nucleotide containing a base able to form a wobble base pair or a functional equivalent thereof. The use of an inosine (hypoxanthine) and/or a universal base and/or a degenerate base and/or a nucleotide containing a base able to form a wobble base pair in an oligonucleotide of the invention is very attractive as explained below. Inosine for example is a known modified base which can pair with three bases: uracil, adenine, and cytosine. Inosine is a nucleoside that is formed when hypoxanthine is attached to a ribose ring (also known as a ribofuranose) via a β [beta]-N9-glycosidic bond. Inosine (I) is commonly found in tRNAs and is essential for proper translation of the genetic code in wobble base pairs. A wobble base pair may exist between G and U, or between I on one hand and U. A or C on the other hand. These are fundamental in the formation of RNA secondary structure. Its thermodynamic stability is comparable to that of the Watson-Crick base pair. The genetic code makes up for disparities in the number of amino acids (20) for triplet codons (64), by using modified base pairs in the first base of the anti-codon.

[0097] A first advantage of using an inosine (hypoxanthine) and/or a universal base and/or a degenerate base and/or a nucleotide containing a base able to form a wobble base pair in an oligonucleotide of the invention allows one to design an oligonucleotide that is capable of binding to a region of a first exon from a pre-mRNA and is capable of binding to a region of a second exon within the same pre-mRNA, wherein said region from said second exon has at least 50% identity with said region of said first exon. In other words, the presence of an inosine (hypoxanthine) and/or a universal base and/or a degenerate base and/or a nucleotide containing a base able to form a wobble base pair in an oligonucleotide of the invention allows the binding of said oligonucleotide to a region of a first exon and to a region of a second exon of said pre-mRNA.

[0098] A second advantage of using an inosine (hypoxanthine) and/or a universal base and/or a degenerate base and/or a nucleotide containing a base able to form a wobble base pair in an oligonucleotide of the invention allows one to design an oligonucleotide that spans a single nucleotide polymorphism (SNP), without concern that the polymorphism will disrupt the oligonucleotide's annealing efficiency. Therefore in the invention, the use of such a base allows to design an oligonucleotide that may be used for an individual having a SNP within the pre-mRNA stretch which is targeted by an oligonucleotide of the invention.

[0099] A third advantage of using an inosine (hypoxanthine) and/or a universal base and/or a degenerate base and/or a nucleotide containing a base able to form a wobble base pair in an oligonucleotide of the invention is when said oligonucleotide would normally contain a CpG if one would have designed it as being complementary to a part of a first pre-mRNA exon as identified herein. The presence of a CpG in an oligonucleotide is usually associated with an increased immunogenicity of said oligonucleotide (Dorn A. and Kippenberger S.,). This increased immunogenicity is undesired since it may induce the breakdown of muscle fibers. Replacing the guanine by an inosine in one, two or more CpGs in said oligonucleotide is expected to provide an oligonucleotide with a decreased and/or acceptable level of immunogenicity. Immunogenicity may be assessed in an animal model by assessing the presence of CD4⁺ and/or CD8⁺ cells and/or inflammatory mononucleocyte infiltration in muscle biopsy of said animal. Immunogenicity may also be assessed in blood of an animal or of a human being treated with an oligonucleotide of the invention by detecting the presence of a neutralizing antibody and/or an antibody recognizing said oligonucleotide using a standard immunoassay known to the skilled person. An increase in immunogenicity preferably corresponds to a detectable increase of at least one of these cell types by comparison to the amount of each cell type in a corresponding muscle biopsy of an animal before treatment or treated with a corresponding oligonucleotide having at least one an inosine (hypoxanthine) and/or a universal base and/or a degenerate base and/or a nucleotide containing a base able to form a wobble base pair. Alternatively, an increase in immunogenicity may be assessed by detecting the presence or an increasing amount of a neutralizing antibody or an antibody recognizing said oligonucleotide using a standard immunoassay. A decrease in immunogenicity preferably corresponds to a detectable decrease of at least one of these cell types by comparison to the amount of corresponding cell type in a corresponding muscle biopsy of an animal before treatment or treated with a corresponding oligonucleotide having no inosine (hypoxanthine) and/or universal base and/or degenerate base and/or nucleotide containing a base able to form a wobble base pair. Alternatively a decrease in immunogenicity may be assessed by the absence of or a decreasing amount of said compound and/or neutralizing antibodies using a standard immunoassay.

[0100] A fourth advantage of using an inosine (hypoxanthine) and/or a universal base and/or a degenerate base and/or a nucleotide containing a base able to form a wobble base pair in an oligonucleotide of the invention is to avoid or decrease a potential multimerisation or aggregation of oligonucleotides. It is for example known that an oligonucleotide comprising a G-quartet motif has the tendency to form a quadruplex, a multimer or aggregate formed by the Hoogsteen base-pairing of four single-stranded oligonucleotides (Cheng A. J. and Van Dyke M. W.), which is of course not desired: as a result the efficiency of the oligonucleotide is expected to be decreased. Multimerisation or aggregation is preferably assessed by standard polyacrylamid non-denaturing gel electrophoresis techniques known to the skilled person. In a preferred embodiment, less than 20% or 15%, 10%, 7%, 5% or less of a total amount of an oligonucleotide of the invention has the capacity to multimerise or aggregate assessed using the assay mentioned above.

[0101] A fifth advantage of using an inosine (hypoxanthine) and/or a universal base and/or a degenerate base and/or a nucleotide containing a base able to form a wobble base pair in an oligonucleotide of the invention is thus also to avoid quadruplex structures which have been associated with antithrombotic activity (Macaya R. E., et al.) as well as with the binding to, and inhibition of, the macrophage scavenger receptor (Suzuki K., et al.,).

[0102] A sixth advantage of using an inosine (hypoxanthine) and/or a universal base and/or a degenerate base and/or a nucleotide containing a base able to form a wobble base pair in an oligonucleotide of the invention is to allow to design an oligonucleotide with improved RNA binding kinetics and/or thermodynamic properties. The RNA binding kinetics and/or thermodynamic properties are at least in part determined by the melting temperature of an oligonucleotide (Tm; calculated with the oligonucleotide properties calculator (http://www.unc.edu/˜cail/biotool/oligo/index.html) for single stranded RNA using the basic Tm and the nearest neighbor model), and/or the free energy of the AON-target exon complex (using RNA structure version 4.5). If a Tm is too high, the oligonucleotide is expected to be less specific. An acceptable Tm and free energy depend on the sequence of the oligonucleotide. Therefore, it is difficult to give preferred ranges for each of these parameters. An acceptable Tm may be ranged between 35 and 85° C. and an acceptable free energy may be ranged between 15 and 45 kcal/mol.

[0103] Depending on its length, an oligonucleotide of the present invention may comprise at least 1, 2, 3, 4, 5, 6, 7, 8, 9, 10 inosines (hypoxanthine) and/or universal bases and/or degenerate bases and/or nucleotides containing a base able to form a wobble base pair or a functional equivalents thereof

[0104] Preferably, said oligonucleotide of the invention comprises RNA, as RNA/RNA duplexes are very stable. It is preferred that an RNA oligonucleotide comprises a modification providing the RNA with an additional property, for instance resistance to endonucleases, exonucleases, and RNaseH, additional hybridisation strength, increased stability (for instance in a bodily fluid), increased or decreased flexibility, reduced toxicity, increased intracellular transport, tissue-specificity, etc. Preferred modifications have been identified above.

[0105] One embodiment thus provides an oligonucleotide which comprises at least one modification. A preferred modified oligonucleotide is fully 2′-O-methyl modified. In one embodiment of the invention, an oligonucleotide comprises or consists of a hybrid oligonucleotide comprising a 2′-O-methyl phosphorothioate oligoribonucleotide modification and a bridged nucleic acid modification (DNA, as exemplified above). In another embodiment of the invention, an oligonucleotide comprises or consists of a hybrid oligonucleotide comprising a 2′-O-methoxyethyl phosphorothioate modification and a bridged nucleic acid (DNA, as exemplified above), In another embodiment of the invention, an oligonucleotide comprises or consists of a hybrid oligonucleotide comprising a bridged nucleic acid (DNA, as exemplified above) modification and an oligodeoxyribonucleotide modification. This particular combination comprises better sequence specificity compared to an equivalent consisting of bridged nucleic acid only, and comprises improved efficacy when compared with an oligonucleotide consisting of 2″-O-methylphosphorothioate oligo(deoxy)ribonucleotide modification.

[0106] The compound as described in the invention may preferably possess ionizable groups. Ionizable groups may be bases or acids, and may be charged or neutral. Ionizable groups may be present as ion pair with an appropriate counterion that carries opposite charge(s). Examples of cationic counterions are sodium, potassium, cesium, Tris, lithium, calcium, magnesium, trialkylammonium, triethylammonium, and tetraalkylammonium. Examples of anionic counterions are chloride, bromide, iodide, lactate, mesylate, acetate, trifluoroacetate, dichloroacetate, and citrate. Examples of counterions have been described (e.g. Kumar L,), which is incorporated here in its entirety by reference], Examples of application of di- or trivalent counterions, especially Ca²⁺, have been described as adding positive characteristics to selected oligonucleotides in US Pat. Appl. 2012046348 (Replicor), which is incorporated in its entirety by reference. Preferred divalent or trivalent counterions are selected from the following list or group: calcium, magnesium, cobalt, iron, manganese, barium, nickel, copper, and zinc. A preferred divalent counterion is Calcium. It is therefore encompassed by the present invention to prepare, obtain and use a composition comprising an oligonucleotide of the invention and any other counterion identified above, preferably calcium. Such a method for the preparation of said composition comprising said oligonucleotide and said counterion, preferably calcium, may be as follows: an oligonucleotide of the invention may be dissolved in a pharmaceutically acceptable aqueous excipient, and gradually a solution comprising said counterion is added to the dissolved oligonucleotide such that the oligonucleotide chelate complex remains soluble.

[0107] Therefore in a preferred embodiment, an oligonucleotide of the invention has been contacted with a composition comprising such counterion preferably Ca²⁺, to form an oligonucleotide chelate complex comprising two or more identical oligonucleotides linked by such a counterion as identified herein. A composition comprising an oligonucleotide chelate complex comprising two or more identical oligonucleotides linked by a counterion, preferably calcium, is therefore encompassed by the present invention.

### Method for Designing an Oligonucleotide

[0108] Accordingly in a further aspect of the invention, there is provided a method for designing an oligonucleotide wherein said method leads to an oligonucleotide as identified above.

[0109] This method comprises the following steps:
[0110] (a) identifying an in-frame combination of a first and a second exon in a same pre-mRNA, wherein a region of said second exon has at least 50% identity with a region of said first exon;
[0111] (b) designing an oligonucleotide that is capable of binding to said region of said first exon and said region of said second exon, and
[0112] (c) wherein said binding results in the skipping of said first exon and said second exon, preferably in the skipping of a multi-exon stretch starting with said first exon and encompassing one or more exons present between said first and said second exons and at the most in the skipping of the entire stretch of exons in between said first and said second exons.

[0113] In step b) of such a method said oligonucleotide is preferably designed so that its binding interferes with at least one splicing regulatory sequence in said regions of said first and/or second exons in said pre-mRNA.

[0114] Alternatively or in combination with the interference of a splicing regulatory sequence, the binding of said oligonucleotide preferably interferes with the secondary structure encompassing at least said first and/or said second exons in said pre-mRNA.

[0115] The oligonucleotide obtainable by this method is capable of inducing the skipping of said first and second exons of said pre-mRNA, Preferably the skipping of additional exon(s) is induced, wherein said additional exon(s) is/are preferably located in between said first and said second exon, and wherein the resulting mRNA transcript is in frame. The oligonucleotide is preferably capable of inducing the skipping of the entire stretch of exons between said first exon and said second exon. In an embodiment, said regions of said first exon and of said second exon comprise a splicing regulatory element, so that the binding of said oligonucleotide is capable of interfering with at least one splicing regulatory sequence in said regions of said first and second exons. It is also encompassed that the binding of said oligonucleotide interferes with the secondary structure encompassing at least said first and/or said second exons in said pre-mRNA. Preferred splicing regulatory sequence comprises a binding site for a serine-arginine (SR) protein, an exonic splicing enhancer (ESE), an exon recognition sequence (ERS) and/or an exonic splicing silencer (ESS).

[0116] Each feature of this method has already been defined herein, or is known to the skilled person.

### Preferred Oligonuclotides

[0117] Preferably, an oligonucleotide of the invention is for use as a medicament, more preferably said compound is for use in RNA modulating therapeutics. More preferred, said RNA modulation leads to correction of a disrupted transcriptional reading frame and/or to restoration of the expression of a desired or anticipated protein. The method of the invention and the oligonucleotide of the invention may thus in principle be applied to any disease linked to the presence of a frame-disrupting mutation, leading to an aberrant transcript and/or to the absence of an encoded protein and/or to the presence of an aberrant protein. In a preferred embodiment the method of the invention and the oligonucleotide of the invention are applied to disease-associated genes carrying repetitive sequences and thus regions with relatively high sequence identity (i.e. at least 50%, 60%, 70%, 80% sequence identity between a region of a second exon and a region of a first exon as defined herein). Not limiting examples are genes with spectrin-like repeats (as the DMD gene involved in Duchenne muscular dystrophy as described herein), Kelch-like repeats (such as the KLHL3 gene involved in familial hyperkalemic hypertension (Louis-Dit-Picard H et al.), the KLHL6 gene involved in chronic lymphocytic leukemia (Puente X S et al.), the KLHL7 gene involved in retinitis pigmentosa (Friedman J S et al.), the KLHL7/12 genes involved in Sjögren's syndrome (Uchida K et al.), the KLHL9 gene involved in distal myopathy (Cirak S et al.), the KLHL16 or GAN gene involved in giant axonal neuropathy (Bomont P et al.), the KLHL19 or KEAP1 gene involved in several cancers (Dhanoa B S et al.), the KLHL20 gene involved promyelocytic leukemia (Dhanoa B S et al.), or the KLHL37 or ENC1 gene involved in brain tumors (Dhanoa B S et al.)), FGF-like repeats, EGF-like repeats (such as the NOTCH3 gene involved CADASIL (Chabriat H et al.), the SCUBE genes involved in cancer or metabolic bone disease, the neurexin-1 (NRXN1) gene involved in neuropsychiatric disorders and idiopathic generalized epilepsy (Moller R S et al.), the Del-1 gene, the Tenascin-C (TNC) gene involved in atherosclerosis and coronary artery disease (Mollie A et al.), the THBS3 gene, or the Fibrillin (FBN1) gene involved in Marfan syndrome (Rantamaki T et al.)), Ankyrin-like repeats (such as the ANKRD1 gene involved in dilated cardiomyopathy (Dubosq-Bidot L et al.), the ANKRD2 gene, the ANKRD11 gene involved in KBG syndrome (Sirmaci A et al.), the ANKRD26 gene involved in thrombocytopenia (Noris P et al.), or diabetes (Raciti G A et al.) the ANKRD55 gene involved in multiple sclerosis (Alloza I et al.), or the TRPV4 gene involved in distal spinal muscular atrophy (Fiorillo C et al.)), HEAT-like repeats (such as the htt gene involved in Huntington's disease), Annexin like-repeats, leucine-rich repeats (such as NLRP2 and NLRP7 genes involved in idiopathic recurrent miscarriage (Huang J Y et al.), the LRRK2 gene involved in Parkinson's disease (Abeliovich A et al.), the NLRP3 gene involved in Alzheimer's disease or meningitis (Heneka M T et al.), the NALP3 gene involved in renal failure (Knauf F et al.), or the LRIG2 gene involved in urofacial syndrome (Stuart H M et al.)), or serine protease inhibitor domains (such as the SPINK5 gene involved in Netherton syndrome (Hovnanian A et al.), as described in Andrade M. A. et al.

[0118] Within the context of the invention a preferred pre-mRNA or transcript is the dystrophin pre-mRNA or transcript. This preferred pre-mRNA or transcript is preferably a human one. A disease linked to the presence of a mutation present in the dystrophin pre-mRNA is DMD or BMD depending on the mutation. Preferred combinations and regions of first and second exons from the dystrophin pre-mRNA to be used in the context of the invention are identified in table 2.

[0119] In a preferred embodiment, a compound of the invention is used for inducing exon-skipping in a cell, in an organ, in a tissue and/or in a patient, preferably in a BMD or DMD patient or in a cell, organ, tissue derived from said patient. Exon-skipping results in a mature mRNA that does not contain a skipped exon and thus, when said exon codes for amino acids can lead to the expression of an altered, internally truncated, but partly to largely functional dystrophin product. Technology for exon skipping is currently directed toward the use of AONs or AON transcribing gene constructs. Exon skipping techniques are nowadays explored in order to combat genetic muscular dystrophies. Promising results have recently been reported by us and others on AON-induced exon skipping therapy aimed at restoring the reading frame of the dystrophin pre-mRNA in cells from the mdx mouse and DMD patients (Heemskerk H., et al.; Cirak S., et al.; Goemans et al.,). By the targeted skipping of a specific exon, a severe DMD phenotype (lacking functional dystrophin) is converted into a milder BMD phenotype (expressing functional or semi-functional dystrophin). The skipping of an exon is preferably induced by the binding of AONs targeting an exon-internal sequence.

[0120] Below, the invention is illustrated by a mutated dystrophin pre-mRNA wherein a first and a second exon are present. As defined herein a dystrophin pre-mRNA preferably means a pre-mRNA of a DMD gene coding for a dystrophin protein. A mutated dystrophin pre-mRNA corresponds to a pre-mRNA of a BMD or DMD patient with a mutation when compared to a wild type DMD pre-mRNA of a non-affected person, resulting in (reduced levels of) an aberrant protein (BMD), or in the absence of functional dystrophin (DMD). A dystrophin pre-mRNA is also named a. DMD pre-mRNA. A dystrophin gene may also be named a DMD gene. Dystrophin and DMD may be used interchangeably throughout the application.

[0121] A patient is preferably intended to mean a patient having DMD or BMD as later defined herein or a patient susceptible to develop DMD or BMD due to his (or her) genetic background. In the case of a DMD patient, a compound used will preferably correct a mutation as present in the DMD gene of said patient and therefore will preferably create a dystrophin protein that will look like a dystrophin protein from a BMD patient: said protein will preferably be a functional or semi-functional dystrophin as later defined herein. In the case of a BMD patient, an antisense oligonucleotide of the invention will preferably modify a mutation as present in the BMD gene of said patient and will preferably create a dystrophin which will be more functional than the dystrophin which was originally present in said BMD patient.

[0122] As defined herein, a functional dystrophin is preferably a wild type dystrophin corresponding to a protein having the amino acid sequence as identified in SEQ ID NO: 1. A functional dystrophin is preferably a dystrophin, which has an acting binding domain in its N terminal part (first 240 amino acids at the N terminus), a cysteine-rich domain (amino acids 3361 till 3685) and a C terminal domain (last 325 amino acids at the C terminus) each of these domains being present in a wild type dystrophin as known to the skilled person. The amino acids indicated herein correspond to amino acids of the wild type dystrophin being represented by SEQ ID NO: 1. In other words, a functional or semi-functional dystrophin is a dystrophin which exhibits at least to some extent an activity of a wild type dystrophin. “At least to some extent” preferably means at least 10%, 20%, 30%, 40%, 50%, 60%, 70%, 80%, 90%, 95% or 100% of a corresponding activity of a wild type functional dystrophin. In this context, an activity of a functional dystrophin is preferably binding to actin and interacting with the dystrophin-associated glycoprotein complex (DGC) or (DAGC) (Ehmsen J et al.). Binding of dystrophin to actin and to the DGC complex may be visualized by either co-immunoprecipitation using total protein extracts or immunofluorescence analysis of cross-sections, from a biopsy of a muscle suspected to be dystrophic, as known to the skilled person.

[0123] Individuals suffering from DMD typically have a mutation in the gene encoding dystrophin that prevents synthesis of the complete protein, e.g. a premature stop prevents the synthesis of the C-terminus. In BMD the dystrophin gene also comprises a mutation but this mutation does not disrupt the open reading frame and the C-terminus is synthesized. As a result a (semi-) functional or functional dystrophin protein is generated that has a similar activity in kind as the wild type protein, although not necessarily a similar amount of activity. The genome of a BMD individual typically encodes a dystrophin protein comprising the N terminal part (first 240 amino acids at the N terminus), a cysteine-rich domain (amino acid 3361 till 3685) and a C terminal domain (last 325 amino acids at the C terminus) but in most cases its central rod shaped domain may be shorter than the one of a wild type dystrophin (Monaco A. P., et al.), Exon skipping for the treatment of DMD is typically directed to bypass the premature stop in the pre-mRNA by skipping an exon flanking or containing the mutation. This allows correction of the open reading frame and synthesis of a internally truncated dystrophin protein but including the C-terminus. In a preferred embodiment, an individual having DMD and being treated with an oligonucleotide of the invention will synthesize a dystrophin which exhibits at least to some extent a similar activity of a wild type dystrophin. More preferably, if said individual is a DMD patient or is suspected to be a DMD patient, a (semi-) functional dystrophin is a dystrophin of an individual having BMD: typically said dystrophin is able to interact with both actin and the DGC or DAGC (Ehmsen J., et al., Monaco A. P., et al.). The central rod domain of wild type dystrophin comprises 24 spectrin-like repeats (Ehmsen J., et al). In many cases, the central rod shaped domain in BMD-like proteins is shorter than the one of a wild type dystrophin (Monaco A. P., et al.). For example, a central rod shaped domain of a dystrophin as provided herein may comprise 5 to 23, 10 to 22 or 12 to 18 spectrin-like repeats as long as it can bind to actin and to the DGC.

[0124] Alleviating one or more symptom(s) of DMD or BMD in an individual using a compound of the invention may be assessed by any of the following assays: prolongation of time to loss of walking, improvement of muscle strength, improvement of the ability to lift weight, improvement of the time taken to rise from the floor, improvement in the nine-meter walking time, improvement in the time taken for four-stairs climbing, improvement of the leg function grade, improvement of the pulmonary function, improvement of cardiac function, improvement of the quality of life. Each of these assays is known to the skilled person. As an example, the publication of Manzur et al (Manzur A. Y. et al.) gives an extensive explanation of each of these assays. For each of these assays, as soon as a detectable improvement or prolongation of a parameter measured in an assay has been found, it will preferably mean that one or more symptoms of DMD or BMD has been alleviated in an individual using a compound of the invention. Detectable improvement or prolongation is preferably a statistically significant improvement or prolongation as described in Hodgetts et al (Hodgetts S., et al.). Alternatively, the alleviation of one or more symptom(s) of DMD or BMD may be assessed by measuring an improvement of a muscle fiber function, integrity and/or survival.

[0125] In a preferred method, one or more symptom(s) of a DMD or a BMD patient is/are alleviated and/or one or more characteristic(s) of one or more muscle cells from a DMD or a BMD patient is/are improved. Such symptoms or characteristics may be assessed at the cellular, tissue level or on the patient self.

[0126] An alleviation of one or more characteristics of a muscle cell from a DMD or BMD patient may be assessed by any of the following assays on a myogenic cell or muscle cell from that patient: reduced calcium uptake by muscle cells, decreased collagen synthesis, altered morphology, altered lipid biosynthesis, decreased oxidative stress, and/or improved muscle fiber function, integrity, and/or survival. These parameters are usually assessed using immunofluorescence and/or histochemical analyses of cross sections of muscle biopsies.

[0127] The improvement of muscle fiber function, integrity and/or survival may be assessed using at least one of the following assays: a detectable decrease of creatine kinase in blood, a detectable decrease of necrosis of muscle fibers in a biopsy cross-section of a muscle suspected to be dystrophic, and/or a detectable increase of the homogeneity of the diameter of muscle fibers in a biopsy cross-section of a muscle suspected to be dystrophic. Each of these assays is known to the skilled person.

[0128] Creatine kinase may be detected in blood as described in Hodgetts et al (Hodgetts S., et al.). A detectable decrease in creatine kinase may mean a decrease of 5%, 10%, 20%, 30%, 40%, 50%, 60%, 70%, 80%, 90% or more compared to the concentration of creatine kinase in a same DMD or BMD patient before treatment.

[0129] A detectable decrease of necrosis of muscle fibers is preferably assessed in a muscle biopsy, more preferably as described in Hodgetts et al (Hodgetts S., et al.) using biopsy cross-sections. A detectable decrease of necrosis may be a decrease of 5%, 10%, 20%, 30%, 40%, 50%, 60%, 70%, 80%, 90% or more of the area wherein necrosis has been identified using biopsy cross-sections. The decrease is measured by comparison to the necrosis as assessed in a same DMD or BMD patient before treatment.

[0130] A detectable increase of the homogeneity of the diameter of a muscle fiber is preferably assessed in a muscle biopsy cross-section, more preferably as described in Hodgetts et al (Hodgetts S., et al.). The increase is measured by comparison to the homogeneity of the diameter of a muscle fiber in a same DMD or BMD patient before treatment.

[0131] Preferably, an oligonucleotide of the invention provides said individual with (higher levels of) a functional and/or a (semi) functional dystrophin protein (both for DMD and BMD) and/or is able to, for at least in part decrease the production of an aberrant dystrophin protein in said individual. In this context, “a” functional and/or “a” semi-functional dystrophin may mean that several forms of functional and/or of semi-functional dystrophin could be generated. This may be expected when a region of at least 50% identity between a first and a second exon overlaps with one or more other region(s) of at least 50% identity between other first and second exons, and when said oligonucleotide is capable of binding to said overlapping part such that several different stretches of exons are skipped and several different in frame transcripts produced. This situation is illustrated in example 4 wherein one single oligonucleotide according to the invention (PS816; SEQ ID NO:1679) is able to induce the production of several in frame transcripts Which all share exon 10 as first exon and wherein the second exon may be 13, 14, 15, 18, 20, 27, 30, 31, 32, 35, 42, 44, 47, 48 or 55.

[0132] Higher levels refer to the increase of a functional and/or (semi) functional dystrophin protein level by comparison to a corresponding level of a functional and/or a (semi) functional dystrophin protein in a patient before the onset of the treatment with an oligonucleotide of the invention. The level of said functional and/or (semi) functional dystrophin protein is preferably assessed using immunofluorescence or western blot analysis (protein).

[0133] Decreasing the production of an aberrant dystrophin mRNA, or aberrant dystrophin protein, preferably means that 90%, 80%, 70%, 60%, 50%, 40%, 30%, 20%, 10%, 5% or less of the initial amount of aberrant dystrophin mRNA, or aberrant dystrophin protein, is still detectable by RT PCR (mRNA) or immunofluorescence or western blot analysis (protein). An aberrant dystrophin mRNA or protein is also referred to herein as a less functional (compared to a wild type functional dystrophin protein as earlier defined herein) or non-functional dystrophin mRNA or protein, A non-functional dystrophin protein is preferably a dystrophin protein which is not able to bind actin and/or members of the DGC protein complex. A non-functional dystrophin protein or dystrophin mRNA does typically not have, or does not encode a dystrophin protein with an intact C-terminus of the protein. In a preferred embodiment an exon skipping (also called RNA-modulating or splice-switching) technique is applied.

[0134] Increasing the production of a functional and/or semi-functional dystrophin mRNA and/or protein, preferably means that such a functional and/or semi-functional dystrophin mRNA and/or protein is detectable or is increased of at least 5%, 10%, 20%, 30%, 40%, 50%, 60%, 70%, 80%, 90% or more by comparison to the detectable quantity of said mRNA and/or protein detectable at the onset of the treatment. Said detection may be carried out using RT-PCR (mRNA) or immunofluorescence or western blot analysis (protein).

[0135] In another embodiment, a compound of the invention provides said individual with a functional or semi-functional dystrophin protein. This functional or semi-functional dystrophin protein or mRNA may be detected as an aberrant dystrophin protein or mRNA as earlier explained herein.

[0136] By the targeted co-skipping of said two exons (said first and said second exons), the skipping of additional exon(s) may be induced wherein said additional exon(s) is/are preferably located in between said first and said second exons, and wherein the resulting dystrophin transcript is in-frame (preferably as in Table 1 or 6), a DMD or severe BMD phenotype is converted into a milder BMD or even asymptomatic phenotype. The co-skipping of said two exons is preferably induced by the binding of an oligonucleotide to a region of a first exon from the dystrophin pre-mRNA and by the binding of an oligonucleotide to a region of a second exon within the dystrophin pre-mRNA, wherein said region of said second exon has at least 50% identity with said region of said first exon. Preferably, said first and said second dystrophin exons, and the identity regions therein, are as identified in Table 2 or 6. Said oligonucleotide preferably exhibits no overlap with non-exon sequences. Said oligonucleotide preferably does not overlap with the splice sites at least not insofar as these are present in an intron. Said oligonucleotide directed toward an exon internal sequence preferably does not contain a sequence reverse-complementary to an adjacent intron. An exon skipping technique is preferably applied such that the absence of said two exons, preferably of additional exon(s), more preferably located in between said first and said second exons, from an mRNA produced from a DMD pre-mRNA generates a coding region for (higher) expression of a more (semi-) functional—albeit shorter—dystrophin protein. In this context (typically a BMD patient), inhibiting inclusion of said two exons, preferably of additional exon(s) located in between said first and said second exons, preferably means that:
[0137] the level of the original, aberrant (less functional) dystrophin mRNA is decreased with at least 5% as assessed by RT-PCR, or that a corresponding aberrant dystrophin protein level is decreased with at least 2% as assessed by immunofluorescence or western blot analysis using anti-dystrophin antibodies; and/or
[0138] an in frame transcript encoding a semi-functional or functional dystrophin protein is detectable or its level is increased of at least 5% as assessed by RT-PCR (mRNA level) or of at least 2% as assessed by immunofluorescence or western blot using anti-dystrophin antibodies (protein level).

[0139] The decrease in aberrant, less-functional or non-functional dystrophin protein is preferably at least 5%, 10%, 20%, 30%, 40%, 50%, 60%, 70%, 80%, 90% or 100% and is preferably in line or parallel to the detection or the increased production of a more functional or semi-functional dystrophin transcript or protein. In this context (typically a DMD patient), inhibiting inclusion of said two exons, preferably of additional exon(s) located in between said first and said second exons, preferably means that (higher levels of) a more functional or (semi) functional dystrophin protein or mRNA is provided to said individual.

[0140] Once a DMD patient is provided with (higher levels of) a (more) functional or semi-functional dystrophin protein, the cause of DMD is at least in part alleviated. Hence, it would then be expected that the symptoms of DMD are sufficiently reduced. The present invention further provides the insight that the skipping of an entire stretch of at least two dystrophin exons from a pre-mRNA comprising said exons is induced or enhanced, when using a single oligonucleotide directed toward or capable of binding to or hybridizing to or reverse-complementary to or capable of targeting) both of the outer exons of said stretch. Throughout the application in a preferred embodiment, an oligonucleotide of the invention is therefore at least 80% reverse complementary to said said region of said first exon and at least 45% reverse complementary to said said region of said second exon as defined herein, wherein said first and second exons correspond to the outer exons of the exon stretch that is to be skipped. More preferably, said oligonucleotide is at least 85%, 90% 95% or 100% reverse complementary to said region of said first and at least 50%, 55%, 60%, 65%, 70%, 75%, 80%, 85%, 90%, 95% or 100% reverse complementary to said region of said second exon. The enhanced skipping frequency also increases the level of more (semi-) functional dystrophin protein produced in a muscle cell of a DMD or BMD individual.

[0141] An oligonucleotide according to the present invention that is preferably used, is preferably reverse-complementary to or is capable of binding or hybridizing to or targeting a region of a first dystrophin exon, said region having at least 13, 14, 15, 16, 17, 18, 19, 20, 21, 22, 23, 24, 25, 26, 27, 28, 29, 30, 31, 32, 33, 34, 35, 36, 37, 38, 39, 40, 41, 42, 43, 44, 45, 46, 47, 48, 49, 50, 51, 52, 53, 54, 55, 56, 57, 58, 59, 60, 61, 62, 63, 64, 65, 66, 67, 68, 69, 70, 71, 72, 73, 74, 75, 76, 77, 78, 79, 80, 90, 100, 110, 120, 130, 140, 150, 160, 170, 180, 190, 200, or more nucleotides,

is preferably reverse-complementary to or is capable of binding or hybridizing to or targeting a region of a second dystrophin exon, said region having at least 13, 14, 15, 16, 17, 18, 19, 20, 21, 22, 23, 24, 25, 26, 27, 28, 29, 30, 31, 32, 33, 34, 35, 36, 37, 38, 39, 40, 41, 42, 43, 44, 45, 46, 47, 48, 49, 50, 51, 52, 53, 54, 55, 56, 57, 58, 59, 60, 61, 62, 63, 64, 65, 66, 67, 68, 69, 70, 71, 72, 73, 74, 75, 76, 77, 78, 79, 80, 90, 100, 110, 120, 130, 140, 150, 160, 170, 180, 190, 200, or more nucleotides, wherein said region of said second exon within the same pre-mRNA has at least 50% identity with said region of said first exon.

[0142] Within the context of the invention, an oligonucleotide may comprise or consist of a functional equivalent of an oligonucleotide. A functional equivalent of an oligonucleotide preferably means an oligonucleotide as defined herein wherein one or more nucleotides have been substituted and wherein an activity of said functional equivalent is retained to at least some extent. Preferably, an activity of said compound comprising a functional equivalent of an oligonucleotide is providing a functional or semi-functional dystrophin protein. Said activity of said compound comprising a functional equivalent of an oligonucleotide is therefore preferably assessed by quantifying the amount of a functional or a semi-functional dystrophin protein. A functional or semi-functional dystrophin is herein preferably defined as being a dystrophin able to bind actin and members of the DOC protein complex and to support the muscle fiber membrane structure and flexibility. The assessment of said activity of a compound comprising a functional oligonucleotide or equivalent preferably includes RT-PCR (to detect exon skipping on RNA level) and/or immunofluorescence or Western blot analysis (to detect protein expression and localisation). Said activity is preferably retained to at least some extent when it represents at least 50%, or at least 60%, or at least 70% or at least 80% or at least 90% or at least 95% or more of corresponding activity of said compound comprising an oligonucleotide where the functional equivalent derives from. Throughout this application, when the word oligonucleotide is used it may be replaced by a functional equivalent thereof as defined herein.

[0143] Hence, the use of an oligonucleotide, or a functional equivalent thereof comprising or consisting of a sequence

which is capable of binding to, targeting, hybridizing to and/or is reverse-complementary to a region of a first dystrophin exon,
which is capable of binding targeting, hybridizing to and/or is reverse-complementary to a region of a second dystrophin exon
and
wherein said region of second exon within the dystrophin pre-mRNA has at least 50% identity with said region of said first exon, exhibits DMD therapeutic results by:
[0144] alleviating one or more symptom(s) of DMD or BMD; and/or
[0145] alleviating one or more characteristics of a muscle cell from a patient; and/or
[0146] providing said individual with a functional or semi-functional dystrophin protein; and/or
[0147] at least in part decreasing the production of an aberrant dystrophin protein in said

[0148] Each of these features has already been defined wherein.

[0149] Preferably, an oligonucleotide is comprising or consisting of a sequence which is capable of binding to, targeting, hybridizing and/or is reverse-complementary to a region of a first DMD or dystrophin exon, wherein a region of a second DMD or dystrophin exon within the same pre-mRNA has at least 50% identity with said region of said first exon. Said first and second exons are preferably selected from the group of exons including exons 8 to 60, wherein the stretch of exons starting with the first exon and comprising the second exon as last exon, when skipped, yields an in frame transcript. Preferred in-frame exon combinations in the dystrophin mRNA are given in Table 1, 2 or 6.

[0150] Without wishing to be hound by any theory, the identity of the first and second dystrophin exons may be determined by one or more of the following aspects. In one embodiment, one or more introns present between the first exon and the second exon are not exceptionally large. In this context, an exceptionally large intron in the dystrophin gene may be 70, 80, 90, 100, 200 kb or more; for example intron 1 (˜83 kb), intron 2 (˜170 kb), intron 7 (˜110 kb), intron 43 (˜70 kb), intron 44 (˜248 kb), intron 55 (˜119 kb), or intron 60 (˜96 kb). In addition in a further embodiment, there may already be an example of a BMD patient expressing a truncated dystrophin protein, wherein this first, this second and the exon stretch from said first exon to said second exon had been deleted. Another criterion may be the relatively large applicability of the skipped exons for combined subpopulations of DMD (and/or BMD) patients with specific relevant mutations.

[0151] In a preferred embodiment, an in-frame stretch of DMD exons is skipped (more preferably entirely skipped within one transcript) wherein the outer exons are defined by a first and a second exon follows:
[0152] first exon is exon 8 and the second exon is exon 19 (applicable to ˜7% of DMD patients),
[0153] first exon is exon 9 and the second exon is exon 22 (applicable to ˜11% of DMD patients),
[0154] first exon is exon 9 and the second exon is exon 30 (applicable to ˜14% of DMD patients),
[0155] first exon is exon 10 and the second exon is exon 18 (applicable to ˜5% of DMD patients),
[0156] first exon is exon 10 and the second exon is exon 30 (applicable to ˜13% of DMD patients),
[0157] first exon is exon 10 and the second exon is exon 42 (applicable to ˜16% of DMD patients),
[0158] first exon is exon 10 and the second exon is exon 47 (applicable to ˜29% of DMD patients),
[0159] first exon is exon 10 and the second exon is exon 57 (applicable to ˜72% of DMD patients),
[0160] first exon is exon 10 and the second exon is exon 60 (applicable to ˜72% of DMD patients),
[0161] first exon is exon 11 and the second exon is exon 23 (applicable to ˜8% of DMD patients),
[0162] first exon is exon 13 and the second exon is exon 30 (applicable to ˜10% of DMD patients),
[0163] first exon is exon 23 and the second exon is exon 42 (applicable to ˜7% of DMD patients),
[0164] first exon is exon 34 and the second exon is exon 53 (applicable to ˜42% of MD patients),
[0165] first exon is exon 40 and the second exon is exon 53 (applicable to ˜38% of DMD patients),
[0166] first exon is exon 44 and the second exon is exon 56 (applicable to ˜40% of DMD patients),
[0167] first exon is exon 45 and the second exon is exon 51 (applicable to ˜17% of DMD patients)
[0168] first exon is exon 45 and the second exon is exon 53 (applicable to ˜28% of DMD patients),
[0169] first exon is exon 45 and the second exon is exon 55 (applicable to ˜33% of DMD patients),
[0170] first exon is exon 45 and the second exon is exon 60 (applicable to ˜37% of DMD patients), or
[0171] first exon is exon 56 and the second exon is exon 60 (applicable to ˜2% of DMD patients).

[0172] Therefore, in an embodiment, an oligonucleotide of the invention induces the skipping of the following dystrophin exons: exons 8 to 19, exons 9 to 22, exons 9 to 30, exons 10 to 18, exons 10 to 30, exons 10 to 42, exons 10 to 47, exons 10 to 57, exons 10 to 60, exons 11 to 23, exons 13 to 30, exons 23 to 42, exons 34 to 53, exons 40 to 53, exons 44 to 56, exons 45 to 51, exons 45 to 53, exons 45 to 55, exons 45 to 60 or exons 56 to 60,

[0173] Preferably, an oligonucleotide of the invention comprises or consists of a sequence that is capable of binding to, targeting, hybridizing and/or is reverse-complementary to a region of a first exon of the dystrophin pre-mRNA such that the reverse-complementary part is at least 30% of the length of said oligonucleotide of the invention, more preferably′ at least 40%, even more preferably at least 50%, even more preferably at least 60%, even more preferably at least 70%, even more preferably at least 80%, even more preferably at least 90% or even more preferably at least 95%, or even more preferably 98% and most preferably up to 100%. In this context, a first exon is preferably exon 8, 9, 10, 11, 13, 23, 34, 40, 44, 45, or 56 of dystrophin pre-mRNA as defined herein. Said oligonucleotide may comprise additional flanking sequences. In a more preferred embodiment, the length of said reverse-complementary part of said oligonucleotide is at least 10, 11, 12, 13, 14, 15, 16, 17, 18, 19, 20, 21, 22, 23, 24, 25, 26, 27, 28, 29, 30, 31, 32, 33, 34, 35, 36, 37, 38, 39, or 40 nucleotides. Several types of flanking sequences may be used. Preferably, flanking sequences are used to modify the binding of a protein to said oligonucleotide, or to modify a thermodynamic property of said oligonucleotide, more preferably to modify target RNA binding affinity. In another preferred embodiment, additional flanking sequences are reverse-complementary to sequences of the dystrophin pre-mRNA which are not present in said exon.

[0174] In a preferred embodiment, an oligonucleotide comprises or consists of a sequence that is capable of binding to, targeting, hybridizing to, and is reverse-complementary to at least a region of a first and to a region of a second dystrophin exon as present in a dystrophin pre-mRNA wherein said first and second exons are selected from the group of exons 8 (SEQ ID NO:2), 9 (SEQ ID NO:3), 10 (SEQ ID NO:4), 11 (SEQ ID NO:1761), 13 (SEQ ID NO:1762), 18 (SEQ ID NO:5), 19 (SEQ ID NO:6), 22 (SEQ ID NO:7), 23 (SEQ ID NO:8), 30 (SEQ ID NO:9), 34 (SEQ ID NO:1763), 40 (SEQ ID NO:1764), 42 (SEQ ID NO:11), 44 (SEQ ID NO:1765), 45 (SEQ ID NO:12), 47 (SEQ ID NO:10), 51 (SEQ ID NO:1760), 53 (SEQ ID NO:13), 55 (SEQ ID NO:14), 56 (SEQ ID NO:15), 57 (SEQ ID NO:1744), or 60 (SEQ ID NO:16), and said regions having at least 10 nucleotides. However, said regions may also have at least 11, 12, 13, 14, 15, 16, 17, 18, 19, 20, 21, 22, 23, 24, 25, 26, 27, 28, 29, 30, 31, 32, 33, 34, 35, 36, 37, 38, 39, 40, 41, 42, 43, 44, 45, 46, 47, 48, 49, 50, 51, 52, 53, 54, 55, 56, 57, 58, 59, 60, 61, 62, 63, 64, 65, 66, 67, 68, 69, 70, 71, 72, 73, 74, 75, 76, 77, 78, 79, 80, 90, 100, 110, 120, 130, 140, 150, 160, 170, 180, 190, 200, or more nucleotides. For the preferred exons identified above, the skilled person is able to identify a region of a first exon and a region of a second exon using techniques known in the art. More preferably the online tool EMBOSS Matcher is used as earlier explained herein. Even more preferably, preferred identity regions of first and second dystrophin exons to which an oligonucleotide of the invention preferably binds and/or is at least in part reverse-complementary to, have been provided in Table 2. Reverse complementarity is in this context preferably of at least 45%, 50%, 55%, 60%, 65%, 70%, 75%, 80%, 85%, 90%, 95% or 100%. A preferred oligonucleotide sequence to be used in the invention is capable of binding to, hybridizing to, targeting and/or is reverse-complementary to a region of identity between said first and second exons, preferably from Table 2, and has a length of at least 10, 11, 12, 13, 14, 15, 16, 17, 18, 19, 20, 21, 22, 23, 24, 25, 26, 27, 28, 29, 30, 31, 32, 33, 34, 35, 36, 37, 38, 39, or 40 nucleotides, more preferably less than 40 nucleotides or more preferably less than 30 nucleotides, even more preferably less than 25 nucleotides and most preferably 20 to 25 nucleotides. Reverse complementarity is in this context preferably of at least 45%, 50%, 55%, 60%, 65%, 70%, 75%, 80%, 85%, 90%, 95% or 100%.

[0175] In an embodiment, a preferred oligonucleotide is such that the first and second dystrophin exons are as identified in table 1, 2 or 6 and said oligonucleotide is capable of binding to the corresponding first and second exon regions as identified in table 2 or 6 and as defined by SEQ ID NO:17 to 1670, 1742, 1743, or 1766 to 1777.

[0176] Preferred oligonucleotides are disclosed in Table 3 and comprise or consist of SEQ ID NO: 1671-1741. Other preferred oligonucleotides comprise or consist SEQ ID NO:1778-1891 as disclosed in Table 6. Preferred oligonucleotides comprise SEQ ID NO: 1671-1741 or 1778-1891 and have 1, 2, 3, 4, or 5 nucleotides more or 1, 2, 3, 4 or 5 nucleotides less than their exact SEQ ID NO as given in table 3 or 6. These additional nucleotides may be present at the 5′ or 3′ side of a given SEQ ID NO. These missing nucleotides may be nucleotides present at the 5′ or 3′ side of a given SEQ ID NO. Each of these oligonucleotides may have any of the chemistries as defined earlier herein or combinations thereof. In each of the oligonucleotides identified by a SEQ ID NO herein, a U may be replaced by a T.

[0177] More preferred oligonucleotides are depicted below.

[0178] If the first dystrophin exon is exon 8 and the second dystrophin exon is exon 19, a preferred region of exon 8 comprises or consists of SEQ ID NO:17 and a preferred region of exon 19 comprises or consists of SEQ ID NO:18. A preferred oligonucleotide consists of SEQ ID NO: 1722, or 1723, or comprises SEQ ID NO: 1722, or 1723 and has a length of 24, 25, 26, 27, 28, 29 or 30 nucleotides.

[0179] If the first dystrophin exon is exon 10 and the second dystrophin exon is exon 13, a preferred region of exon 10 comprises or consists of SEQ ID NO:101 and a preferred region of exon 13 comprises or consists of SEQ ID NO:102.

[0180] If the first dystrophin exon is exon 10 and the second dystrophin exon is exon 14, a preferred region of exon 10 comprises or consists of SEQ ID NO:103 and a preferred region of exon 14 comprises or consists of SEQ ID NO:104.

[0181] If the first dystrophin exon is exon 10 and the second dystrophin exon is exon 15, a preferred region of exon 10 comprises or consists of SEQ ID NO:105 and a preferred region of exon 15 comprises or consists of SEQ ID NO:106.

[0182] If the first dystrophin exon is exon 10 and the second dystrophin exon is exon 18, a preferred region of exon 10 comprises or consists of SEQ ID NO:109 and a preferred region of exon 18 comprises or consists of SEQ ID NO:110. Preferred oligonucleotides comprise:
[0183] a base sequence as defined in any one of SEQ ID NO: 1679 to 1681, 1778, 1812, 1813, 1884 to 1886, 1890, or 1891, and have a length of 25, 26, 27, 28, 29 or 30 nucleotides or
[0184] a base sequence as defined in SEQ ID NO: 1814 and have a length of 26, 27, 28, 79 or 30 nucleotides; or
[0185] a base sequence as defined in any one of SEQ ID NO: 1815 to 1819 and have a length of 22, 23, 24, 25, 26, 27, 28, 29 or 30 nucleotides, or
[0186] a base sequence as defined in any one of SEQ ID NO: 1820, 1824, and have a length of 20, 21, 22, 23, 24, 25, 26, 27, 28, 29 or 30 nucleotides, or
[0187] a base sequence as defined in any one of SEQ ID NO: 1826, 1782, 1832 and have a length of 21, 22, 23, 24, 25, 26, 27, 28, 29 or 30 nucleotides, or
[0188] a base sequence as defined in any one of SEQ ID NO: 1821, 1825, 1780 and have a length of 22, 23, 24, 25, 26, 27, 28, 29 or 30 nucleotides, or
[0189] a base sequence as defined in any one of SEQ ID NO: 1822 and have a length of 24, 25, 26, 27, 28, 29 or 30 nucleotides, or
[0190] a base sequence as defined in any one of SEQ ID NO: 1823, 1781, 1829, 1830, 1831 and have a length of 25, 26, 27, 28, 29 or 30 nucleotides,
[0191] a base sequence as defined in any one of SEQ ID NO: 1887 and and have a length of 24, 25, 26, 27, 28, 29 or 30 nucleotides, or
[0192] a base sequence as defined in any one of SEQ ID NO: 1888 or 1889 and and have a length of 26, 27, 28, 29 or 30 nucleotides, or
[0193] a base sequence as defined in SEQ ID NO: 1827 and have a length of 21, 22, 23, 24, 25, 26, 27, 28, 29 or 30 nucleotides, or
[0194] a base sequence as defined in SEQ ID NO: 1828 and have a length of 25, 26, 27, 28, 29 or 30 nucleotides.

[0195] If the first dystrophin exon is exon 10 and the second dystrophin exon is exon 18, another preferred region of exon 10 comprises or consists of SEQ ID NO:1766 and another preferred region of exon 18 comprises or consists of SEQ ID NO:1767. Preferred oligonucleotides comprise a base sequence as defined in any one of SEQ ID NO: 1783, 1833, 1834, 1835 and have a length of 17, 18, 19, 20, 21, 22, 23, 24, 25, 26, 27, 28, 29 or 30 nucleotides.

[0196] If the first dystrophin exon is exon 10 and the second dystrophin exon is exon 18, another preferred region of exon 10 comprises or consists of SEQ ID NO:1768 and another preferred region of exon 18 comprises or consists of SEQ ID NO:1769, Preferred oligonucleotides comprise a base sequence as defined in any one of SEQ ID NO: 1673 or 1674 and have a length of 25, 26, 27, 28, 29 or 30 nucleotides.

[0197] If the first dystrophin exon is exon 10 and the second dystrophin exon is exon 20, a preferred region of exon 10 comprises or consists of SEQ ID NO: 111 and a preferred region of exon 20 comprises or consists of SEQ ID NO:112.

[0198] If the first dystrophin exon is exon 10 and the second dystrophin exon is exon 27, a preferred region of exon 10 comprises or consists of SEQ ID NO:121 and a preferred region of exon 27 comprises or consists of SEQ ID NO:1.22.

[0199] If the first dystrophin exon is exon 10 and the second dystrophin exon is exon 30, a preferred region of exon 10 comprises or consists of SEQ ID NO:127 and a preferred region of exon 30 comprises or consists of SEQ ID NO:128. Preferred oligonucleotides comprise:
[0200] a base sequence as defined in any one of SEQ ID NO: 1679 to 1681, 1812, 1813, 1884 to 1886, 1890, or 1891 and have a length of 25, 26, 27, 28, 29 or 30 nucleotides or
[0201] a base sequence as defined in SEQ ID NO: 1814 and have a length of 26, 27, 28, 29 or 30 nucleotides; or
[0202] a base sequence as defined in SEQ ID NO: 1675 or 1676 and have a length of 21, 22, 23, 24, 25, 26, 27, 28, 29 or 30 nucleotides; or
[0203] abuse sequence as defined in SEQ ID NO: 1677 or 1678 and have a length of 25, 26, 27, 28, 29 or 30 nucleotides, or
[0204] a base sequence as defined in any one of SEQ ID NO: 1784, 1836 and have a length of 21, 22, 23, 24, 25, 26, 27, 28, 29 or 30 nucleotides, or
[0205] a base sequence as defined in any one of SEQ ID NO: 1786, 1838 and have a length of 25, 26, 27, 28, 29 or 30 nucleotides, or
[0206] a base sequence as defined in any one of SEQ ID NO: 1780 and have a length of 22, 23, 24, 25, 26, 27, 28, 29 or 30 nucleotides, or
[0207] a base sequence as defined in any one of SEQ ID NO: 1785, 1837 and have a length of 25, 26, 27, 28, 29 or 30 nucleotides.

[0208] If the first dystrophin exon is exon 10 and the second dystrophin exon is exon 30, another preferred region of exon 10 comprises or consists of SEQ ID NO:1772 and another preferred region of exon 30 comprises or consists of SEQ OD NO:1773, Preferred oligonucleotides comprise:
[0209] a base sequence as defined in any one of SEQ ID NO: 1688, 1689, 1839, 1840, 1841, 1842, 1843 or 1844 and have a length of 26, 27, 28, 29 or 30 nucleotides or
[0210] a base sequence as defined in any one of SEQ ID NO: 1845, 1846, 1847, 1848 and have a length of 24, 25, 26, 27, 28, 29 or 30 nucleotides, or
[0211] a base sequence as defined in any one of SEQ ID NO: 1849, 1850 and have a length of 22, 23, 24, 25, 26, 27, 28, 29 or 30 nucleotides, or
[0212] a base sequence as defined in any one of SEQ ID NO: 1787, 1851 and have length of 26, 27, 28, 29 or 30 nucleotides.

[0213] If the first dystrophin exon is exon 10 and the second dystrophin exon is exon 31, a preferred region of exon 10 comprises or consists of SEQ ID NO:129 and a preferred region of exon 31 comprises or consists of SEQ ID NO:130.

[0214] If the first dystrophin exon is exon 10 and the second dystrophin exon is exon 32, a preferred region of exon 10 comprises or consists of SEQ ID NO:131 and a preferred region of exon 32 comprises or consists of SEQ ID NO:132.

[0215] If the first dystrophin exon is exon 10 and the second dystrophin exon is exon 35, a preferred region of exon 10 comprises or consists of SEQ ID NO:137 and a preferred region of exon 35 comprises or consists of SEQ ID NO:138.

[0216] If the first dystrophin exon is exon 10 and the second dystrophin exon is exon 42, a preferred region of exon 10 comprises or consists of SEQ ID NO:151 and a preferred region of exon 42 comprises or consists of SEQ ID NO:152.

[0217] If the first dystrophin exon is exon 10 and the second dystrophin exon is exon 44, a preferred region of exon 10 comprises or consists of SEQ ID NO:153 and a preferred region of exon 44 comprises or consists of SEQ ID NO:154.

[0218] If the first dystrophin exon is exon 10 and the second dystrophin exon is exon 47, a preferred region of exon 10 comprises or consists of SEQ ID NO:157 and a preferred region of exon 47 comprises or consists of SEQ ID NO:158.

[0219] If the first dystrophin exon is exon 10 and the second dystrophin exon is exon 48, a preferred region of exon 10 comprises or consists of SEQ ID NO:159 and a preferred region of exon 48 comprises or consists of SEQ ID NO:160.

[0220] If the first dystrophin exon is exon 10 and the second dystrophin exon is exon 55, a preferred region of exon 10 comprises or consists of SEQ ID NO:167 and a preferred region of exon 55 comprises or consists of SEQ ID NO:168.

[0221] If the first dystrophin exon is exon 10 and the second dystrophin exon is exon 57, a preferred region of exon 10 comprises or consists of SEQ ID NO:169 and a preferred region of exon 57 comprises or consists of SEQ ID NO:170.

[0222] If the first dystrophin exon is exon 10 and the second dystrophin exon is exon 60, a preferred region of exon 10 comprises or consists of SEQ ID NO:173 and a preferred region of exon 60 comprises or consists of SEQ ID NO:1.74.

[0223] A preferred oligonucleotide consists of SEQ ID NO: 1673 or comprises SEQ ID NO:1673 and has a length of 25, 26, 27, 28, 29 or 30 nucleotides.

[0224] A preferred oligonucleotide consists of SEQ ID NO: 1675 or comprises SEQ ID NO:1675 and has a length of 21, 22, 23, 24, 25, 26, 27, 28, 29 or 30 nucleotides.

[0225] A preferred oligonucleotide consists of SEQ ID NO: 1677 or comprises SEQ ID NO:1677 and has a length of 25, 26, 27, 28, 29 or 30 nucleotides.

[0226] A preferred oligonucleotide consists of SEQ ID NO: 1679 or comprises SEQ ID NO:1679 and has a length of 25, 26, 27, 28, 29 or 30 nucleotides. A preferred oligonucleotide comprises the base sequence SEQ ID NO:1679 and has a length of 25, 26, 27, 28, 29 or 30 nucleotides. Optionally 1, 2, 3, 4, 5, 6, 7 of the U of SEQ ID NO:1679 has been replaced by a T. In a preferred embodiment, all U of SEQ ID NO:1679 have been replaced by T. A preferred oligonucleotide comprising SEQ ID NO: 1679 comprises any of the chemistries defined earlier herein: a base modification and/or a sugar modification and/or a backbone modification.

[0227] A preferred oligonucleotide consists of SEQ ID NO: 1681 or comprises SEQ ID NO:1681 and has a length of 25, 26, 27, 28, 29 or 30 nucleotides.

[0228] A preferred oligonucleotide consists of SEQ ID NO: 1684 or comprises SEQ ID NO:1684 and has a length of 21, 22, 23, 24, 25, 26, 27, 28, 29 or 30 nucleotides.

[0229] A preferred oligonucleotide consists of SEQ ID NO: 1685 or comprises SEQ ID NO:1685 and has a length of 21, 22, 23, 24, 25, 26, 27, 28, 29 or 30 nucleotides.

[0230] A preferred oligonucleotide consists of SEQ ID NO: 1686 or comprises SEQ ID NO:1686 and has a length of 21, 22, 23, 24, 25, 26, 27, 28, 29 or 30 nucleotides.

[0231] A preferred oligonucleotide consists of SEQ ID NO: 1688 or comprises SEQ ID NO:1688 and has a length of 26, 27, 28, 29 or 30 nucleotides. A preferred oligonucleotide comprises the base sequence SEQ ID NO:1688 and has a length of 26, 27, 28, 29 or 30 nucleotides.

[0232] Optionally 1, 2, 3, 4, 5, 6 of the U of SEQ ID NO:1688 has/been replaced by a T. In a preferred embodiment, all U of SEQ ID NO:1688 have been replaced by T. A preferred oligonucleotide comprising SEQ ID NO: 1688 comprises any of the chemistries defined earlier herein: a base modification and/or a sugar modification and/or a backbone modification.

[0233] For each of the oligonucleotides represented by SEQ ID NO:1673, 1675, 1677, 1679, 1681, 1684, 1685, 1686 and 1688 the first dystrophin exon is exon 10. However, the second dystrophin exon is exon 13, 14, 15, 18, 20, 27, 30, 31, 32, 35, 42, 44, 47, 48, 55, 57, or 60. This means that using any of these oligonucleotides the formation of several in frame transcripts may occur, each leading to the production of a truncated but (semi)functional dystrophin protein.

[0234] If the first dystrophin exon is exon 11 and the second dystrophin exon is exon 23, a preferred region of exon 23 comprises or consists of SEQ ID NO:191 and a preferred region of exon 23 comprises or consists of SEQ ID NO:192. Preferred oligonucleotides comprise:
[0235] a base sequence as defined in any one of SEQ ID NO: 1794, 1861, 1795, 1862 and have a length of 21, 22, 23, 24, 25, 26, 27, 28, 29 or 30 nucleotides, or
[0236] a base sequence as defined in any one of SEQ ID NO: 1796, 1863, 1797, 1864 and have a length of 23, 24, 25, 26, 27, 28, 29 or 30 nucleotides, or
[0237] a base sequence as defined in any one of SEQ ID NO: 1798, 1865, 1799, 1866 and have a length of 25, 26, 27, 28, 29 or 30 nucleotides.

[0238] If the first dystrophin exon is exon 13 and the second dystrophin exon is exon 30, a preferred region of exon 13 comprises or consists of SEQ ID NO:285 and a preferred region of exon 30 comprises or consists of SEQ ID NO:286. Preferred oligonucleotides comprise:
[0239] a base sequence as defined in any one of SEQ ID NO: 1808, 1867, 1809, 1868, 1810, 1869, 1858, 1873 and have a length of 21, 22, 24, 25, 26, 27, 28, 29 or 30 nucleotides
[0240] a base sequence as defined in any one of SEQ ID NO: 1811, 1870, 1859, 1874 and have a length of 22, 23, 24, 25, 26, 27, 28, 29 or 30 nucleotides, or
[0241] a base sequence as defined in any one of SEQ ID NO: 1856, 1871, 1860, 1875 and having a length of 23, 24, 25, 26, 27, 28, 29 or 30 nucleotides, or
[0242] a base sequence as defined in any one of SEQ ID NO: 1857, 1872 and having a length of 26, 27, 28, 29 or 30 nucleotides.

[0243] If the first dystrophin exon is exon 23 and the second dystrophin exon is exon 42, a preferred region of exon 23 comprises or consists of SEQ ID NO:776 and a preferred region of exon 42 comprises or consists of SEQ. ID NO:777 Preferred oligonucleotides comprise or consist of SEQ ID NO: 1698-1703.

[0244] If the first dystrophin exon is exon 34 and the second dystrophin exon is exon 53, a preferred region of exon 34 comprises or consists of SEQ ID NO:1294 and a preferred region of exon 53 comprises or consists of SEQ ID NO:1295. Preferred oligonucleotides comprise:
[0245] a base sequence as defined in any one of SEQ ID NO: 1800, 1876, 1801, 1877 and have a length of 19, 20, 21, 22, 23, 24, 25, 26, 27, 28, 29 or 30 nucleotides, or
[0246] a base sequence as defined in any one of SEQ ID NO: 1802, 1878, 1803, 1879 and have a length of 23, 24, 25, 26, 27, 28, 29 or 30 nucleotides.

[0247] If the first dystrophin exon is exon 40 and the second dystrophin exon is exon 53, a preferred region of exon 40 comprises or consists of SEQ ID NO:1477 and a preferred region of exon 53 comprises or consists of SEQ ID NO:1478. Preferred oligonucleotides comprise:
[0248] a base sequence as defined in any one of S|80 ID NO: 1804, 1880 and have a length of 21, 22, 23, 24, 25, 26, 27, 28, 29 or 30 nucleotides, or
[0249] a base sequence as defined in any one of SEQ ID NO: 1805, 1881 and have a length of 22, 73, 24, 25, 26, 27, 78, 29 or 30 nucleotides.

[0250] If the first dystrophin exon is exon 44 and the second dystrophin exon is exon 56, a preferred region of exon 44 comprises or consists of SEQ ID NO:1577 and a preferred region of exon 56 comprises or consists of SEQ ID NO:1558. Preferred oligonucleotides comprise a base sequence as defined in any one of SEQ ID NO: 1806, 1882, 1807, 1883 and have a length of 20, 21, 22, 23, 24, 25, 26, 27, 28, 29 or 30 nucleotides.

[0251] If the first dystrophin exon is exon 45 and the second dystrophin exon is exon 51, a preferred region of exon 45 comprises or consists of SEQ ID NO:1567 and a preferred region of exon 51 comprises or consists of SEQ ID NO:1568. Preferred oligonucleotides comprise or consist of SEQ ID NO: 1730-1731.

[0252] If the first dystrophin exon is exon 45 and the second dystrophin exon is exon 53, a preferred region of exon 45 comprises or consists of SEQ ID NO:1569 and a preferred region of exon 53 comprises or consists of SEQ ID NO:1570. Preferred oligonucleotides comprise or consist of SEQ ID NO: 1732-1737.

[0253] If the first dystrophin exon is exon 45 and the second dystrophin exon is exon 0.5.5, a preferred region of exon 45 comprises or consists of SEQ ID NO:1571 and a preferred region of exon 55 comprises or consists of SEQ ID NO:1572. Preferred oligonucleotides comprise or consist of SEQ ID NO: 1704-1719, 1788, 1852, 1789, 1853.

[0254] A preferred oligonucleotide consists of SEQ ID NO: 1706 or comprises SEQ ID NO:1706 and has a length of 25, 26, 27, 28, 29 or 30 nucleotides. A preferred oligonucleotide comprising SEQ ID NO:1706 and having a length of 25 nucleotides consists of SEQ. ID NO: 1706.

[0255] A preferred oligonucleotide consists of SEQ ID NO: 1707 or comprises SEQ ID NO:1707 and has a length of 23, 24, 25, 26, 27, 28, 29 or 30 nucleotides. A preferred oligonucleotide comprising SEQ ID NO:1707 and having a length of 25 nucleotides consists of SEQ ID NO: 1706.

[0256] A preferred oligonucleotide consists of SEQ ID NO: 1713 or comprises SEQ ID NO:1713 and has a length of 23, 24, 25, 26, 27, 28, 29 or 30 nucleotides. A preferred oligonucleotide comprising SEQ ID NO:1713 and having a length of 25 nucleotides consists of SEQ ID NO: 1710.

[0257] Preferred oligonucleotides comprise a base sequence as defined in any one of SEQ ID NO: 1788, 1852, 1789, 1853 and have a length of 24, 25, 26, 27, 28, 29 or 30 nucleotides

[0258] If the first dystrophin exon is exon 45 and the second dystrophin exon is exon 55, another preferred region of exon 45 comprises or consists of SEQ ID NO:1774 and another preferred region of exon 55 comprises or consists of SEQ ID NO:1775. Preferred oligonucleotides comprise a base sequence as defined in any one of SEQ ID NO: 1790, 1854, 1792, 1855 and have a length of 25, 26, 27, 28, 29 or 30 nucleotides.

[0259] If the first dystrophin exon is exon 45 and the second dystrophin exon is exon 60, a preferred region of exon 45 comprises or consists of SEQ ID NO:1577 and a preferred region of exon 60 comprises or consists of SEQ ID NO:1578. Preferred oligonucleotides comprise or consist of SEQ ID NO: 1738-1741.

[0260] If the first dystrophin exon is exon 56 and the second dystrophin exon is exon 60, a preferred region of exon 56 comprises or consists of SEQ ID NO:1742 and a preferred region of exon 60 comprises or consists of SEQ ID NO:1743: Preferred oligonucleotides comprise or consist of SEQ ID NO: 1720-1721.

[0261] More preferred oligonucleotide comprise:
[0262] (a) the base sequence as defined in SEQ ID NO: 1673 or 1674 and have a length of 25, 26, 27, 28, 29 or 30 nucleotides; or
[0263] (b) the base sequence as defined in SEQ ID NO: 1675 or 1676 and have a length of 21, 22, 23, 24, 25, 26, 27, 28, 29 or 30 nucleotides; or
[0264] (c) the base sequence as defined in SEQ ID NO: 1677 or 1678 and have a length of 25, 26, 27, 28, 29 or 30 nucleotides; or
[0265] (d) the base sequence as defined in any one of SEQ ID NO: 1679 to 1681 and have a length of 25, 26, 27, 28, 29 or 30 nucleotides; or
[0266] (e) the base sequence as defined in any one of SEQ ID NO: 1684 to 1686 and have a length of 21, 22, 23, 24, 25, 26, 27, 28, 29 or 30 nucleotides; or
[0267] (f) the base sequence as defined in SEQ ID NO: 1688 or 1689 and have a length of 26, 27, 28, 29 or 30 nucleotides; or
[0268] (g) the base sequence as defined in any one of SEQ ID NO: 1704 to 1706 and have a length of 25, 26, 27, 28, 29 or 30 nucleotides.
[0269] (h) the base sequence as defined in any one of SEQ ID NO: 1707 to 1709 and have a length of 23, 24, 25, 26, 27, 28, 29 or 30 nucleotides; or
[0270] (i) the base sequence as defined in any one of SEQ ID NO: 1710, 1713 to 1717 and have a length of 23, 24, 25, 26, 27, 28, 29 or 30 nucleotides.

[0271] Even more preferred oligonucleotides comprise:
[0272] (a) the base sequence as defined in any one of SEQ ID NO: 1679 to 1681, 1778, 1812, 1813, 1884 to 1886, 1890, or 1891, and having a length of 25, 26, 27, 28, 29 or 30 nucleotides or SEQ ID NO: 1814 and having a length of 26, 27, 28, 29 or 30 nucleotides; or
[0273] (b) the base sequence as defined in SEQ ID NO: 1688, 1689, or 1839 to 1844, and having a length of 26, 27, 28, 29 or 30 nucleotides; or
[0274] (c) the base sequence as defined in SEQ ID NO: 1673 or 1674 and having a length of 25, 26, 27, 28, 29 or 30 nucleotides; or
[0275] (d) the base sequence as defined in SEQ ID NO: 1675 or 1676 and having a length of 21, 22, 23, 24, 25, 26, 27, 28, 29 or 30 nucleotides; or
[0276] (e) the base sequence as defined in SEQ ID NO: 1677 or 1678 and having a length of 25, 26, 27, 28, 29 or 30 nucleotides; or
[0277] (f) the base sequence as defined in any one of SEQ ID NO: 1684 to 1686 and having a length of 21, 22, 23, 24, 25, 26, 27, 28, 29 or 30 nucleotides; or
[0278] (g) the base sequence as defined in any one of SEQ ID NO: 1704 to 1706 and having a length of 25, 26, 27, 28, 29 or 30 nucleotides,
[0279] (h) the base sequence as defined in any one of SEQ ID NO: 1707 to 1709 and having a length of 23, 24, 25, 26, 27, 28, 29 or 30 nucleotides; or
[0280] (i) the base sequence as defined in any one of SEQ ID NO: 1710, 1713 to 1717 and having a length of 23, 24, 25, 26, 27, 28, 29 or 30 nucleotides or
[0281] (j) the base sequence as defined in any one of SEQ ID NO: 1815 to 1819 and having a length of 22, 23, 24, 25, 26, 27, 28, 29 or 30 nucleotides, or
[0282] (k) the base sequence as defined in any one of SEQ ID NO: 1820, 1824, and having a length of 20, 21, 22, 23, 24, 25, 26, 27, 28, 29 or 30 nucleotides, or
[0283] (l) the base sequence as defined in any one of SEQ ID NO: 1826, 1782, 1832 and having a length of 21, 22, 23, 24, 25, 26, 27, 28, 29 or 30 nucleotides, or

[0284] (m) base sequence as defined in any one of SEQ ID NO: 1821, 1825, 1780 and having a length of 22, 23, 24, 25, 26, 27, 28, 29 or 30 nucleotides, or
[0285] (n) base sequence as defined in any one of SEQ ID NO: 1822 and having a length of 24, 25, 26, 27, 28, 29 or 30 nucleotides, or
[0286] (o) base sequence as defined in any one of SEQ ID NO: 1823, 1781, 1829, 1830, 1831 and having a length of 25, 26, 27, 28, 29 or 30 nucleotides, or
[0287] (p) base sequence as defined in any one of SEQ ID NO: 1783, 1833, 1834, 1835 and having a length of 17, 18, 19, 20, 21, 22, 23, 24, 25, 26, 27, 28, 29 or 30 nucleotides, or
[0288] (q) base sequence as defined in any one of SEQ ID NO: 1887 and and have a length of 24, 25, 26, 27, 28, 29 or 30 nucleotides, or
[0289] (r) base sequence as defined in any one of SEQ ID NO: 1888 or 1889 and and have a length of 26, 27, 28, 29 or 30 nucleotides, or
[0290] (s) base sequence as defined in SEQ ID NO: 1827 and have a length of 21, 22, 23, 24, 25, 26, 27, 28, 29 or 30 nucleotides, or
[0291] (t) a base sequence as defined in SEQ ID NO: 1828 and have a length of 25, 26, 27, 28, 29 or 30 nucleotides, or
[0292] (u) base sequence as defined in any one of SEQ ID NO: 1784, 1836 and having a length of 21, 22, 23, 24, 25, 26, 27, 28, 29 or 30 nucleotides, or
[0293] (v) or base sequence as defined in any one of SEQ ID NO: 1786, 1838 and having a length of 25, 26, 27, 28, 29 or 30 nucleotides, or
[0294] (w) base sequence as defined in any one of SEQ ID NO: 1780 and having a length of 22, 23, 24, 25, 26, 27, 28, 29 or 30 nucleotides, or
[0295] (x) base sequence as defined in any one of SEQ ID NO: 1785, 1837 and having a length of 25, 26, 27, 28, 29 or 30 nucleotides, or
[0296] (y) base sequence as defined in any one of SEQ ID NO: 1845, 1846, 1847, 1848 and having a length of 24, 25, 26, 27, 28, 29 or 30 nucleotides, or
[0297] (z) base sequence as defined in any one of SEQ ID NO: 1849, 1850 and having a length of 22, 23, 24, 25, 26, 27, 28, 29 or 30 nucleotides, or
[0298] (a1) base sequence as defined in any one of SEQ ID NO: 1787, 1851 and having a length of 26, 27, 28, 29 or 30 nucleotides, or
[0299] (b1) base sequence as defined in any one of SEQ ID NO: 1788, 1852, 1789, 1853 and having a length of 24, 25, 26, 27, 28, 29 or 30 nucleotides, or
[0300] (e1) base sequence as defined in any one of SEQ ID NO: 1790, 1854, 1792, 1855 and having a length of 25, 26, 27, 28, 29 or 30 nucleotides, or
[0301] (d1) base sequence as defined in any one of SEQ ID NO: 1794, 1861, 1795, 1862 and having a length of 21, 22, 23, 24, 25, 26, 27, 28, 29 or 30 nucleotides, or
[0302] (e1) base sequence as defined in any one of SEQ ID NO: 1796, 1863, 1797, 1864 and having a length of 23, 24, 25, 26, 27, 28, 29 or 30 nucleotides, or
[0303] (f1) base sequence as defined in any one of SEQ ID NO: 1798, 1865, 1799, 1866 and having a length of 25, 26, 27, 28, 29 or 30) nucleotides, or
[0304] (g1) base sequence as defined in any one of SEQ ID NO: 1808, 1867, 1809, 1868, 1810, 1869, 1858, 1873 and having a length of 21, 22, 23, 24, 25, 26, 27, 28, 29 or 30 nucleotides, or
[0305] (h1) base sequence as defined in any one of SEQ ID NO: 1811, 1870, 1859, 1874 and having a length of 22, 23, 24, 25, 26, 27, 28, 29 or 30 nucleotides, or
[0306] (i1) base sequence as defined in any one of SEQ ID NO: 1856, 1871, 1860, 1875 and having a length of 23, 24, 25, 26, 27, 28, 29 or 30 nucleotides, or
[0307] (j1) base sequence as defined in any one of SEQ ID NO: 1857, 1872 and having a length of 26, 27, 28, 29 or 30 nucleotides, or
[0308] (k1) base sequence as defined in any one of SEQ ID NO: 1800, 1876, 1801, 1877 and having a length of 19, 20, 21, 22, 23, 24, 25, 26, 27, 28, 29 or 30 nucleotides, or
[0309] (l1) base sequence as defined in any one of SEQ ID NO: 1802, 1878, 1803, 1879 and having a length of 23, 24, 25, 26, 27, 28, 29 or 30 nucleotides, or
[0310] (m1) base sequence as defined in any one of SEQ ID NO: 1804, 1880 and having a length of 21, 22, 23, 24, 25, 26, 27, 28, 29 or 30 nucleotides, or
[0311] (n1) base sequence as defined in any one of SEQ ID NO: 1805, 1881 and having a length of 22, 23, 24, 25, 26, 27, 28, 29 or 30 nucleotides, or
[0312] (o1) base sequence as defined in any one of SEQ ID NO: 1806, 1882, 1807, 1883 and having a length of 20, 21, 22, 23, 24, 25, 26, 27, 28, 29 or 30 nucleotides.

[0313] The oligonucleotide according to the invention, which comprises or consists of a sequence as defined by a SEQ ID number is also meant to encompass an oligonucleotide comprising the base sequence as defined in the SEQ ID, Oligonucleotides having a modified backbone (i.e. modified sugar moieties and/or modified internucleoside linkages) with respect to those defined by the SEQ IDs are also encompassed within the invention. Each base U in a SEQ ID NO of an oligonucleotide as identified herein may be modified or replaced by a T.

### Composition

[0314] In a further aspect, there is provided a composition comprising an oligonucleotide as described in the previous section entitled “Oligonucleotide”. This composition preferably comprises or consists of an oligonucleotide as described above. A preferred composition comprises one single oligonucleotide as defined above. It is therefore clear that the skipping of at least said first and said second exon is obtained using one single oligonucleotide and not using a cocktail of distinct oligonucleotides.

[0315] In a preferred embodiment, said composition is for use as a medicament. Said composition is therefore a pharmaceutical composition. A pharmaceutical composition usually comprises a pharmaceutically accepted carrier, diluent and/or excipient. In a preferred embodiment, a composition of the current invention comprises a compound as defined herein and optionally further comprises a pharmaceutically acceptable formulation, filler, preservative, solubilizer, carrier, diluent, excipient, salt, adjuvant and/or solvent. Such pharmaceutically acceptable carrier, filler, preservative, solubilizer, diluent, salt, adjuvant, solvent and/or excipient may for instance be found in Remington. The compound as described in the invention possesses at least one ionizable group. An ionizable group may be a base or acid, and may be charged or neutral. An ionizable group may be present as ion pair with an appropriate counterion that carries opposite charge(s). Examples of cationic counterions are sodium, potassium, cesium, Tris, lithium, calcium, magnesium, trialkylammonium, triethylammonium, and tetraalkylammonium. Examples of anionic counterions are chloride, bromide, iodide, lactate, mesylate, acetate, trifluoroacetate, dichloroacetate, and citrate. Examples of counterions have been described (Kumar L., which is incorporated here in its entirety by reference). Therefore in a preferred embodiment, an oligonucleotide of the invention is contacted with a composition comprising such ionizable groups, preferably Ca form an oligonucleotide chelate complex comprising two or more identical oligonucleotides linked by such a multivalent cation as already defined herein.

[0316] A pharmaceutical composition may be further formulated to further aid in enhancing the stability, solubility, absorption, bioavailability, pharmacokinetics and cellular uptake of said compound, in particular formulations comprising excipients or conjugates capable of forming complexes, nanoparticles, microparticles, nanotubes, nanogels, hydrogels, poloxamers or pluronics, polymersomes, colloids, microbubbles, vesicles, micelles, lipoplexes, and/or liposomes. Examples of nanoparticles include polymeric nanoparticles, gold nanoparticles, magnetic nanoparticles, silica nanoparticles, lipid nanoparticles, sugar particles, protein nanoparticles and peptide nanoparticles.

[0317] A preferred composition comprises at least one excipient that may further aid in enhancing the targeting and/or delivery of said composition and/or said oligonucleotide to and/or into muscle and/or a cell. A cell may be a muscular cell.

[0318] Another preferred composition may comprise at least one excipient categorized as a second type of excipient. A second type of excipient may comprise or contain a conjugate group as described herein to enhance targeting and/or delivery of the composition and/or of the oligonucleotide of the invention to a tissue and/or cell and/or into a tissue and m cell, as for example muscle tissue or cell. Both types of excipients may be combined together into one single composition as identified herein. Preferred conjugate groups are disclosed in the part dedicated to the definitions.

[0319] The skilled person may select, combine and/or adapt one or more of above or other alternative excipients and delivery systems to formulate and deliver a compound for use in the present invention.

[0320] Such a pharmaceutical composition of the invention may be administered in an effective concentration at set times to an animal, preferably a mammal. More preferred mammal is a human being. A compound or a composition as defined herein for use according to the invention may be suitable for direct administration to a cell, tissue and/or an organ in vivo of individuals, preferably said individuals are affected by or at risk of developing BMD or DMD, and may be administered directly in vivo, ex vivo or in vitro. Administration may be via systemic and/or parenteral routes, for example intravenous, subcutaneous, intraventricular, intrathecal, intramuscular, intranasal, enteral, intravitreal, intracerebral, epidural or oral route. Preferably, such a pharmaceutical composition of the invention may be encapsulated in the form of an emulsion, suspension, pill, tablet, capsule or soft-gel for oral delivery, or in the form of aerosol or dry powder for delivery to the respiratory tract and lungs.

[0321] In an embodiment a compound of the invention may be used together with another compound already known to be used for the treatment of said disease. Such other compounds may be used for slowing down progression of disease, for reducing abnormal behaviors or movements, for reducing muscle tissue inflammation, for improving muscle fiber function, integrity and/or survival and/or improve, increase or restore cardiac function. Examples are, but not limited to, a steroid, preferably a (gluco)corticosteroid, an ACE inhibitor (preferably perindopril), an angiotensin II type I receptor blocker (preferably losartan), a tumor necrosis factor-alpha (TNFα) inhibitor, a TGFβ inhibitor (preferably decorin), human recombinant biglycan, a source of mIGF-1, a myostatin inhibitor, mannose-6-phosphate, an antioxidant, an ion channel inhibitor, a protease inhibitor, a phosphodiesterase inhibitor (preferably a PDE5 inhibitor, such as sildenafil or tadalafil), L-arginine, dopamine blockers, amantadine, tetrabenazine, and/or co-enzyme Q10. This combined use may be a sequential use: each component is administered in a distinct composition. Alternatively each compound may be used together in a single composition.

### Use

[0322] In a further aspect, there is provided the use of a composition or a compound as described herein for use as a medicament or part of therapy, or applications in which the compound exerts its activity intracellularly.

[0323] In a preferred embodiment, a compound or composition of the invention is for use as a medicament wherein the medicament is for preventing, delaying, ameliorating and/or treating a disease as defined herein, preferably DMD or BMD.

Method for Preventing, Delaying, Ameliorating and/or Treating a Disease

[0324] In a further aspect, there is provided a method for preventing, delaying, ameliorating and/or treating a disease as defined herein, preferably DMD or BMD. Said disease may be prevented, treated, delayed, or ameliorated in an individual, in a cell, tissue or organ of said individual. The method comprising administering an oligonucleotide or a composition of the invention to said individual or a subject in the need thereof.

[0325] The method according to the invention wherein an oligonucleotide or composition as defined herein may be suitable for administration to a cell, tissue and/or an organ in vivo of individuals, preferably individuals affected by BMD or DMD or at risk of developing such disease, and may be administered in vivo, ex vivo or in citric. An individual or a subject in need is preferably a mammal, more preferably a human being.

[0326] In an embodiment, in a method of the invention, a concentration of an oligonucleotide or composition is ranged from 0.01 nM to 1 μM. More preferably, the concentration used is from 0.02 to 400 nM, or from 0.05 to 400 n-M, or from 0.1 to 400 nM, even more preferably from 0.1 to 200 nM.

[0327] Dose ranges of an oligonucleotide or composition according to the invention are preferably designed on the basis of escalating dose studies in clinical trials (in vivo use) for which rigorous protocol requirements exist. An oligonucleotide as defined herein may be used at a dose which is ranged from 0.01 to 200 mg/kg or 0.05 to 100 mg/kg or 0.1 to 50 mg/kg or 0.1 to 20 mg/kg, preferably from 0.5 to 10 mg/kg.

[0328] The ranges of concentration or dose of an oligonucleotide or composition as given above are preferred concentrations or doses for in vitro or ex vivo uses. The skilled person will understand that depending on the identity of the oligonucleotide used, the target cell to be treated, the gene target and its expression levels, the medium used and the transfection and incubation conditions, the concentration or dose of said oligonucleotide used may further vary and may need to be optimised any further.

### DEFINITIONS

[0329] “Sequence identity”, as known in the art, is a relationship between two or more nucleic acid (polynucleotide or nucleotide) sequences, as determined by comparing the sequences. In the art, the percentage of “identity” or “similarity” indicates the degree of sequence relatedness between nucleic acid sequences as determined by the match between strings of such sequences. “Identity” may be replaced by “similarity” herein. Preferably, the percentage of identity is determined by comparing the whole SEQ ID NO as identified herein. However, part of a sequence may also be used. Part of a sequence in this context may mean at least 5%, 10%, 20%, 30%, 40%, 50%, 60%, 70%, 80%, 90% or 100% of a given sequence or SEQ ID NO.

[0330] “Identity” and “similarity” can be readily calculated by known methods, including but not limited to those described in Computational Molecular Biology, Lesk, A. M., ed., Oxford University Press, New York, 1988; Biocomputing: Informatics and Genome Projects, Smith, D. W., ed., Academic Press, New York, 1993; Computer Analysis of Sequence Data, Part 1, Griffin, A. M., and Griffin, H. G., eds., Humana Press, New Jersey, 1994; Sequence Analysis in Molecular Biology, von Heine, G., Academic Press, 1987; and Sequence Analysis Primer Gribskov, M. and Devereux, J., eds., M Stockton Press, New York, 1991; and Carillo, H., and Lipman, D., SIAM J. Applied Math., 48:1073 (1988).

[0331] Preferred methods to determine identity are designed to give the largest match between the sequences tested. Methods to determine identity and similarity are codified in publicly available computer programs. Preferred computer program methods to determine identity and similarity between two sequences include e.g. the GCG program package (Devereux, J., et al., Nucleic Acids Research 12 (1):387 (1984)), BestFit and FASTA (Altschul, S. F. et al., J. Mol. Biol. 215:403-410 (1990). The BLAST 2.0 family of programs which can be used for database similarity searches includes: eg. BLASTN for nucleotide query sequences against nucleotide database sequences. The BLAST 2.0 family programs are publicly available from NCBI and other sources (BLAST Manual, Altschul, S., et al., NCBI NLM NIH Bethesda, Md. 20894; Altschul, S., et al., J. Mol. Biol. 215:403-410 (1990)). The well-known Smith Waterman algorithm may also be used to determine identity.

[0332] Preferred parameters for nucleic acid comparison include the following: Algorithm: Needleman and Wunsch, J. Mol. Biol. 48:443-453 (1970); Comparison matrix: matches=+10, mismatch=0; Gap Penalty: 50; Gap Length Penalty: 3. Available as the Gap program from Genetics Computer Group, located in Madison, Wis. Given above are the default parameters for nucleic acid comparisons.

[0333] Another preferred method to determine sequence similarity and identity is by using the algorithm Needleman-Wunsch (Needleman, S. B. and Wunsch, C. D. (1970). J. Mol. Biol. 48, 443-453, Kruskal, J. B. (1983) An overview of sequence comparison In D. Sankoff and J. B. Kruskal, (ed.), Time warps, string edits and macromolecules: the theory and practice of sequence comparison, pp. 1-44 Addison Wesley),

[0334] Another preferred method to determine sequence similarity and identity is by using EMBOSS Matcher and the Waterman-Eggert algorithm (local alignment of two sequences; [Schoniger and Waterman, Bulletin of Mathematical Biology 1992, Vol. 54 (4), pp. 521-536; Vingron and Waterman, J. Mol. Biol. 1994; 235(1), p1-12.]). The following websites could be used: http://www.ebi.ac.uk/Tools/emboss/align/index.html or http://emboss.bioinformatics.nl/cgi-bin/emboss/matcher. Definitions of the parameters used in this algorithm are found at the following website: http://emboss.sourceforge.net/docs/themes/AlignForinats.html#id. Preferably, the default settings (Matrix: EDNAFULL, Gap_penalty: 16, Extend_penalty: 4) are used. Emboss Matcher provides the best local alignments between two sequences, but alternative alignments are provided as well. Table 2 discloses the best local alignments between two different exons, preferably dystrophin exons, which are preferably used for oligonucleotide design. However, also alternative alignments and thus alternative identity regions between two exons may be identified and used for oligonucleotide design, which is also part of this invention.

[0335] Throughout the application, the word “binds”, “targets”, “hybridizes” could be used interchangeably when used in the context of an oligonucleotide which is reverse complementary to a region of a pre-mRNA as identified herein. Similarly, the expressions “is capable of binding”, “is capable of targeting” and “is capable of hybridizing” can be used interchangeably to indicate that an oligonucleotide has a certain sequence which allows binding, targeting or hybridization to a target sequence. Whenever a target sequence is defined herein or known in the art, the skilled person is able to construct all possible structures of said oligonucleotide, using the concept of reverse complementarity. In this respect, it will be understood that a limited number of sequence mismatches or gaps between the oligonucleotide of the invention and the target sequences in first and/or second exon is allowable, as long as the binding is not affected, as discussed above. Thus, an oligonucleotide that is capable of binding to a certain target sequence, can be regarded as an oligonucleotide that is reverse complementary to that target sequence. In the context of the invention, “hybridizes” or “is capable of hybridizing” is used under physiological conditions in a cell, preferably a human cell unless otherwise indicated.

[0336] As used herein, “hybridization” refers to the pairing of complementary oligomeric compounds (e.g., an antisense compound and its target nucleic acid). While not limited to a particular mechanism, the most common mechanism of pairing involves hydrogen bonding, which may be Watson-Crick, Hoogsteen or reversed Hoogsteen hydrogen bonding, between complementary nucleoside or nucleotide bases (nucleobases). For example, the natural base adenine is nucleobase complementary to the natural nucleobases thymine, 5-methyluracil and uracil which pair through the formation of hydrogen bonds. The natural base guanine is is nucleobase complementary to the natural bases cytosine and 5-methylcytosine. Hybridization can occur under varying circumstances.

[0337] Similarly, “reverse complementarity” is used to identify two nucleotide sequences which are able to hybridize to one another, while one of the sequences is oriented from 3′ to 5′ and the other in the reverse direction, i.e. from 5′ to 3′. Thus, a nucleoside A on a first nucleotide sequence is able to pair with a nucleoside A* on a second nucleotide sequence, via their respective nucleobases, and a nucleoside B, located at 5′-position from the aforementioned nucleoside A in the first nucleotide sequence, is able to pair with a nucleoside B*, which is located at the 3′-position from the aforementioned nucleoside A* in the second nucleotide sequence. In the context of the present invention, the first nucleotide sequence is typically an oligonucleotide of the invention, and the second nucleotide sequence part of an exon from a pre-mRNA, preferably the dystrophin pre-mRNA. An oligonucleotide is preferably said to be reverse complementary to a region of an exon (first and/or second exon) when said oligonucleotide is at least 45, 50, 55, 60, 65, 70, 75, 80, 85, 90, 95, 100% reverse complementary with said region of said first and/or second exon. Preferably, the reverse complementarity is at least 80%, 85%, 90%. 95% or 100%.

[0338] Within the context of the invention, excipients include polymers (e.g. polyethyleneimine (PEI), polypropyleneimine (PPI), dextran derivatives, butylcyanoacrylate (PBCA), hexylcyanoacrylate (PHCA), poly(lactic-co-glycolic acid) (PLGA), polyamines (e.g. spermine, spermidine, putrescine, cadaverine), chitosan, poly(amido amines) (PAMAM), polyester amine), polyvinyl ether, polyvinyl pyrrolidone (PVP), polyethylene glycol (PEG) cyclodextrins, hyaluronic acid, colominic acid, and derivatives thereof), dendrimers (e.g. poly(amidoamine)), lipids {e.g. 1,2-dioleoyl-3-dimethylammonium propane (DODAP), dioleoyldimethylammonium chloride (DODAC), phosphatidylcholine derivatives [e.g. 1,2-distearoyl-sn-glycero-3-phosphocholine (DSPC)], lyso-phosphatidylcholine derivaties [e.g. 1-stearoyl-2-lyso-sn-glycero-3-phosphocholine (S-LysoPC)], sphingomyeline, 2-{3-[Bis-(3-amino-propyl)-amino]-propylamino}-N-ditetracedyl carbamoyl methylacetamide (RPR209120), phosphoglycerol derivatives [e.g. 1,2-dipalmitoyl-sn-glycero-3-phosphoglycerol, sodium salt (DPPG-Na), phosphaticid acid derivatives [1,2-distearoyl-sn-glycero-3-phosphaticid acid, sodium salt (DSPA), phosphatidylethanolamine derivatives [e.g. dioleoyl-phosphatidylethanolamine (DOPE), 1,2-distearoyl-sn-glycero-3-phosphoethanolamine (DSPE), 2-diphytanoyl-sn-glycero-3-phosphoethanolamine (DPhyPE), N-[1-(2,3-dioleoyloxy)propyl]-N,N,N-trimethylammonium (DOTAP), N-[1-(2,3-dioleyloxyl)propyl]-N,N,N-trimethylammonium (DOTMA), 1,3-di-oleoyloxy-2-(6-carboxy-spermyl)-propylamid (DOSPER), (1,2-dimyristyolxypropyl-3-dimethylhydroxy ethyl ammonium (DMRIE), (N1-cholesteryloxycarbonyl-3,7-diazanonane-1,9-diamine (CDAN), dimethyldioctadecylammonium bromide (DDAB), 1-palmitoyl-2-oleoyl-sn-glycerol-3-phosphocholine (POPC), (b-L-arginyl-2,3-L-diaminopropionic acid-N-palmityl-N-olelyl-amide trihydrochloride (AtuFECT01), N,N-dimethyl-3-aminopropane derivatives [e.g. 1,2-distearoyloxy-N,N-dimethyl-3-aminopropane (DSDMA), 1,2-dioleyloxy-N,N-dimethyl-3-aminopropane (DoDMA), 1,2-dilinoleyloxy-N,N-3-dimethylaminopropane (DLinDMA), 2,2-dilinoleyl-4-dimethylaminomethyl [1,3]-dioxolane (DLin-K-DMA), phosphatidylserine derivatives [1,2-dioleyl-sn-glycero-3-phospho-L-serine, sodium salt (DOPS)], cholesterol}, proteins (e.g. albumin, gelatins, atellocollagen), and peptides (e.g. protamine, PepFects, NickFects, polyarginine, polylysine, CADY, MPG).

[0339] Within the context of the invention, conjugate groups are selected from the group consisting of targeting moieties, stability enhancing moieties, uptake enhancing moieties, solubility enhancing moieties, pharmacokinetics enhancing moieties, pharmacodynamics enhancing moieties, activity enhancing moieties, reporter molecules and drugs, wherein these moieties may be peptides, proteins, carbohydrates, polymers, ethylene glycol derivatives, vitamins, lipids, polyfluoroalkyl moieties, steroids, cholesterol, fluorescent moieties and radioactively labeled moieties. Conjugate groups may optionally be protected and may be attached directly to an oligonucleotide of the invention or via a divalent or multivalent linker.

[0340] Conjugate groups include moieties that enhance targeting, uptake, solubility, activity, pharmacodynamics, pharmacokinetics, or that decrease toxicity. Examples of such groups include peptides (e.g. glutathione, polyarginine, RXR peptides (see e.g. Antimicrob. Agents Chemother. 2009, 53, 525), polyornithine, TAT, TP10, pAntp, polylysine, NLS, penetratin, MSP. ASSLNIA, MPG, CADY, Pep-1, Pip, SAP, SANE), Transportan, buforin 11, polymyxin B, histatin, CPP5, NickFects, PepFects), vivo-porter, proteins (e.g. antibodies, avidin, Ig, transferrin, albumin), carbohydrates (e.g. glucose, galactose, mannose, maltose, maltotriose, ribose, trehalose, glucosamine. N-acetylglucosamine, lactose, sucrose, fucose, arabinose, talose, sialic acid, hyaluronic acid, neuramidinic acid, rhamnose, quinovose, galactosamine, N-acetylgalactosamine, xylose, lyxose, fructose, mannose-6-phosphate, 2-deoxyribose, glucal, cellulobiose, chitobiose, chitotriose), polymers (e.g. polyethylene glycol, poiyethyleneimine, polylactic acid, poly(amidoamine)), ethylene glycol derivatives (e.g. triethyleneglycol, tetraethyleneglycol), water soluble vitamins (e.g. vitamin B, B1, B2, B3, B5, B6, B7, B9, B12, C), fat-soluble vitamins (e.g. vitamin A, D, D2, D3, E, K1, K2, K3), lipids (e.g. palmityl, myristyl, oleyl, stearyl, batyl, glycerophospholipid, glycerolipid, sphingolipid, ceramide, cerebroside, sphingosine, sterol, prenol, erucyl, arachidonyl, linoleyl, linolenyl, arachidyl, butyryl, sapeinyl, elaidyl, lauryl, behenyl, nonyl, decyl, undecyl, octyl, heptyl, hexyl, pentyl, DOPE, DOTAP, terpenyl, diterpenoid, triterpernoid), poly moieties (e.g. perfluoro[1H,1H,2H,2H]-alkyl), approved drugs of MW<1500 Da that have affinity for specific proteins (e.g. NSAIDs such as ibuprofen (more are described in U.S. Pat. No. 6,656,730, incorporated herein by reference), antidepressants, antivirals, antibiotics, alkylating agents, amebicides, analgesics, androgens, ACE inhibitors, anorexiants, antacids, anthelmintics, anti-angiogenics, antiadrenergics, anti-anginals, anticholinergics, anticoagulants, anticonvulsants, antidiabetics, antidiaarheals, antidiuretics, antidotes, antifungals, antiemetics, antivertigos, antigouts, antigonadotropics, antihistamines, antihyperlipidemics, antihypertensives, antimalrials, antimigraines, antineoplastics, antipsychotics, antirheumatics, antithyroids, antitoxins, antitussives, anxiolytics, contraceptives, CNS stimulants, chelators, cardiovascular agents, decongestants, dermatological agents, diuretics, expectorants, diagnostics, gastrointestinal agents, anesthetics, glucocorticoids, antiarrhythmics, immunostimulants, immunosuppressives, laxatives, leprostatics, metabolic agents, respiratory agents, mucolytics, muscle relaxants, nutraceuticals, vasodilators, thrombolytics, uterotonics, vasopressors), natural compounds of MW<2000 Da (e.g. antibiotics, eicosanoids, alkaloids, flavonoids, terpenoids, enzyme cofactors, polyketides), steroids (e.g. prednisone, prednisolone, dexamethasone, lanosterol, cholic acid, estrane, androstane, pregnane, cholane, cholestane, ergosterol, cholesterol, cortisol, cortisone, deflazacort), pentacyclic triterpenoids (e.g. 18β-glycyrrhetinic acid, ursolic acid, amyrin, carbenoloxone, enoxolone, acetoxolone, betulinic acid, asiatic acid, erythrodiol, oleanolic acid), polyamines (e.g. spermine, spermidine, putrescine, cadaverine), fluorescent moieties (e.g. FAM, carboxyfluorescein, FITC, TAMRA, JOE, HEX, TET, rhodamine, Cy3, Cy3.5, Cy5, Cy5.5, CW800, BODIPY, AlexaFluors, Dabcyl, DNP), reporter molecules (e.g. acridines, biotins, digoxigenin, (radio)isotopically labeled moieties (with e.g., ²H, ¹³C, ¹⁴C, ¹⁵N, ¹⁸O, ¹⁸F, ³²P, ³⁵S, ⁵⁷Co, ^{99m}Tc, ¹²³I, ¹²⁵I, ¹³¹I, ¹⁵³Gd)) and combinations thereof. Such conjugate groups may be connected directly to the compounds of the invention, or via a linker. This linker may be divalent (yielding a 1:1 conjugate) or multivalent, yielding an oligomer with more than one conjugate group, Procedures for coupling such a conjugate group, either directly or via a linker, to the oligomer according to the invention are known in the art. Also within the context of the invention is the use of nanoparticles to which oligonucleotides of the invention are covalently linked, to the extent that such constructs are called spherical nucleic acids (SNAs), as for example described in J. Am. Chem, Soc. 2008, 130, 12192 (Hurst et al. incorporated here in its entirety by reference).

[0341] In this document and in its claims, the verb “to comprise” and its conjugations is used in its non-limiting sense to mean that items following the word are included, but items not specifically mentioned are not excluded. In addition the verb “to consist” may be replaced by “to consist essentially of” meaning that an oligonucleotide or a composition as defined herein may comprise additional component(s) than the ones specifically identified, said additional component(s) not altering the unique characteristic of the invention. In addition, reference to an element by the indefinite article “a” or “an” does not exclude the possibility that more than one of the element is present, unless the context clearly requires that there be one and only one of the elements. The indefinite article “a” or “an” thus usually means “at least one”. The word “about” or “approximately” when used in association with a numerical value (about 10) preferably means that the value may be the given value of 10 more or less 1% of the value.

[0342] Each embodiment as identified herein may be combined together unless otherwise indicated. All patent and literature references cited in the present specification are hereby incorporated by reference in their entirety.

[0343] The following examples are offered for illustrative purposes only, and are not intended to limit the scope of the present invention in any way.

### EXAMPLES

### Tables 1-3

TABLE 1
List of possible exon combinations in the DMD gene transcript for which exon U
(upstream) has a continued open reading frame with exon D (downstream) if exons U + 1 (a
first exon) to D − 1 (a second exon), and any exons in between, are removed from the
transcript.

| First | Second |
|---|---|
| Exon (‘U’) | Exon (‘D’) |
| 1 | 8, 20, 22, 51, 53, 59, 62, 64, 65, 67, 76, 79 |
| 2 | 5, 6, 9, 10, 11, 13, 14, 15, 16, 17, 19, 21, 23, 24, 25, 26, 27, 28, 29, 30, 31, 32, 33, 34, 35, 36, 37, 38, 39, 40, 41, |
| | 42, 43, 45, 47, 49, 50, 52, 54, 56, 58, 60, 61, 68, 70 |
| 3 | 6, 9, 10, 11, 13, 14, 15, 16, 17, 19, 21, 23, 24, 25, 26, 27, 28, 29, 30, 31, 32, 33, 34, 35, 36, 37, 38, 39, 40, 41, 42, |
| | 43, 45, 47, 49, 50, 52, 54, 56, 58, 60, 61, 68, 70 |
| 4 | 9, 10, 11, 13, 14, 15, 16, 17, 19, 21, 23, 24, 25, 26, 27, 28, 29, 30, 31, 32, 33, 34, 35, 36, 37, 38, 39, 40, 41, 42, |
| | 43, 45, 47, 49, 50, 52, 54, 56, 58, 60, 61, 68, 70 |
| 5 | 9, 10, 11, 13, 14, 15, 16, 17, 19, 21, 23, 24, 25, 26, 27, 28, 29, 30, 31, 32, 33, 34, 35, 36, 37, 38, 39, 40, 41, 42, |
| | 43, 45, 47, 49, 50, 52, 54, 56, 58, 60, 61, 68, 70 |
| 6 | 12, 18, 44, 46, 55, 57, 63, 66, 69, 71, 72, 73, 74, 75, 77, 78 |
| 7 | 20, 22, 51, 53, 59, 62, 64, 65, 67, 76, 79 |
| 8 | 11, 13, 14, 15, 16, 17, 19, 21, 23, 24, 25, 26, 27, 28, 29, 30, 31, 32, 33, 34, 35, 36, 37, 38, 39, 40, 41, 42, 43, 45, |
| | 47, 49, 50, 52, 54, 56, 58, 60, 61, 68, 70 |
| 9 | 13, 14, 15, 16, 17, 19, 21, 23, 24, 25, 26, 27, 28, 29, 30, 31, 32, 33, 34, 35, 36, 37, 38, 39, 40, 41, 42, 43, 45, 47, |
| | 49, 50, 52, 54, 56, 58, 60, 61, 68, 70 |
| 10 | 13, 14, 15, 16, 17, 19, 21, 23, 24, 25, 26, 27, 28, 29, 30, 31, 32, 33, 34, 35, 36, 37, 38, 39, 40, 41, 42, 43, 45, 47, |
| | 49, 50, 52, 54, 56, 58, 60, 61, 68, 70 |
| 11 | 18, 44, 46, 55, 57, 63, 66, 69, 71, 72, 73, 74, 75, 77, 78 |
| 12 | 15, 16, 17, 19, 21, 23, 24, 25, 26, 27, 28, 29, 30, 31, 32, 33, 34, 35, 36, 37, 38, 39, 40, 41, 42, 43, 45, 47, 49, 50, |
| | 52, 54, 56, 58, 60, 61, 68, 70 |
| 13 | 16, 17, 19, 21, 23, 24, 25, 26, 27, 28, 29, 30, 31, 32, 33, 34, 35, 36, 37, 38, 39, 40, 41, 42, 43, 45, 47, 49, 50, 52, |
| | 54, 56, 58, 60, 61, 68, 70 |
| 14 | 17, 19, 21, 23, 24, 25, 26, 27, 28, 29, 30, 31, 32, 33, 34, 35, 36, 37, 38, 39, 40, 41, 42, 43, 45, 47, 49, 50, 52, 54, |
| | 56, 58, 60, 61, 68, 70 |
| 15 | 19, 21, 23, 24, 25, 26, 27, 28, 29, 30, 31, 32, 33, 34, 35, 36, 37, 38, 39, 40, 41, 42, 43, 45, 47, 49, 50, 52, 54, 56, |
| | 58, 60, 61, 68, 70 |
| 16 | 19, 21, 23, 24, 25, 26, 27, 28, 29, 30, 31, 32, 33, 34, 35, 36, 37, 38, 39, 40, 41, 42, 43, 45, 47, 49, 50, 52, 54, 56, |
| | 58, 60, 61, 68, 70 |
| 17 | 44, 46, 55, 57, 63, 66, 69, 71, 72, 73, 74, 75, 77, 78 |
| 18 | 21, 23, 24, 25, 26, 27, 28, 29, 30, 31, 32, 33, 34, 35, 36, 37, 38, 39, 40, 41, 42, 43, 45, 47, 49, 50, 52, 54, 56, 58, |
| | 60, 61, 68, 70 |
| 19 | 22, 51, 53, 59, 62, 64, 65, 67, 76, 79 |
| 20 | 23, 24, 25, 26, 27, 28, 29, 30, 31, 32, 33, 34, 35, 36, 37, 38, 39, 40, 41, 42, 43, 45, 47, 49, 50, 52, 54, 56, 58, 60, |
| | 61, 68, 70 |
| 21 | 51, 53, 59, 62, 64, 65, 67, 76, 79 |
| 22 | 25, 26, 27, 28, 29, 30, 31, 32, 33, 34, 35, 36, 37, 38, 39, 40, 41, 42, 43, 45, 47, 49, 50, 52, 54, 56, 58, 60, 61, 68, |
| | 70 |
| 23 | 26, 27, 28, 29, 30, 31, 32, 33, 34, 35, 36, 37, 38, 39, 40, 41, 42, 43, 45, 47, 49, 50, 52, 54, 56, 58, 60, 61, 68, 70 |
| 24 | 27, 28, 29, 30, 31, 32, 33, 34, 35, 36, 37, 38, 39, 40, 41, 42, 43, 45, 47, 49, 50, 52, 54, 56, 58, 60, 61, 68, 70 |
| 25 | 28, 29, 30, 31, 32, 33, 34, 35, 36, 37, 38, 39, 40, 41, 42, 43, 45, 47, 49, 50, 52, 54, 56, 58, 60, 61, 68, 70 |
| 26 | 29, 30, 31, 32, 33, 34, 35, 36, 37, 38, 39, 40, 41, 42, 43, 45, 47, 49, 50, 52, 54, 56, 58, 60, 61, 68, 70 |
| 27 | 30, 31, 32, 33, 34, 35, 36, 37, 38, 39, 40, 41, 42, 43, 45, 47, 49, 50, 52, 54, 56, 58, 60, 61, 68, 70 |
| 28 | 31, 32, 33, 34, 35, 36, 37, 38, 39, 40, 41, 42, 43, 45, 47, 49, 50, 52, 54, 56, 58, 60, 61, 68, 70 |
| 29 | 32, 33, 34, 35, 36, 37, 38, 39, 40, 41, 42, 43, 45, 47, 49, 50, 52, 54, 56, 58, 60, 61, 68, 70 |
| 30 | 33, 34, 35, 36, 37, 38, 39, 40, 41, 42, 43, 45, 47, 49, 50, 52, 54, 56, 58, 60, 61, 68, 70 |
| 31 | 34, 35, 36, 37, 38, 39, 40, 41, 42, 43, 45, 47, 49, 50, 52, 54, 56, 58, 60, 61, 68, 70 |
| 32 | 35, 36, 37, 38, 39, 40, 41, 42, 43, 45, 47, 49, 50, 52, 54, 56, 58, 60, 61, 68, 70 |
| 33 | 36, 37, 38, 39, 40, 41, 42, 43, 45, 47, 49, 50, 52, 54, 56, 58, 60, 61, 68, 70 |
| 34 | 37, 38, 39, 40, 41, 42, 43, 45, 47, 49, 50, 52, 54, 56, 58, 60, 61, 68, 70 |
| 35 | 38, 39, 40, 41, 42, 43, 45, 47, 49, 50, 52, 54, 56, 58, 60, 61, 68, 70 |
| 36 | 39, 40, 41, 42, 43, 45, 47, 49, 50, 52, 54, 56, 58, 60, 61, 68, 70 |
| 37 | 40, 41, 42, 43, 45, 47, 49, 50, 52, 54, 56, 58, 60, 61, 68, 70 |
| 38 | 41, 42, 43, 45, 47, 49, 50, 52, 54, 56, 58, 60, 61, 68, 70 |
| 39 | 42, 43, 45, 47, 49, 50, 52, 54, 56, 58, 60, 61, 68, 70 |
| 40 | 43, 45, 47, 49, 50, 52, 54, 56, 58, 60, 61, 68, 70 |
| 41 | 45, 47, 49, 50, 52, 54, 56, 58, 60, 61, 68, 70 |
| 42 | 45, 47, 49, 50, 52, 54, 56, 58, 60, 61, 68, 70 |
| 43 | 46, 55, 57, 63, 66, 69, 71, 72, 73, 74, 75, 77, 78 |
| 44 | 47, 49, 50, 52, 54, 56, 58, 60, 61, 68, 70 |
| 45 | 55, 57, 63, 66, 69, 71, 72, 73, 74, 75, 77, 78 |
| 46 | 49, 50, 52, 54, 56, 58, 60, 61, 68, 70 |
| 47 | 50, 52, 54, 56, 58, 60, 61, 68, 70 |
| 48 | 52, 54, 56, 58, 60, 61, 68, 70 |
| 49 | 52, 54, 56, 58, 60, 61, 68, 70 |
| 50 | 53, 59, 62, 64, 65, 67, 76 |
| 51 | 54, 56, 58, 60, 61, 68, 70 |
| 52 | 59, 62, 64, 65, 67, 76 |
| 53 | 56, 58, 60, 61, 68, 70 |
| 54 | 57, 63, 66, 69, 71, 72, 73, 74, 75, 77, 78 |
| 55 | 58, 60, 61, 68, 70 |
| 56 | 63, 66, 69, 71, 72, 73, 74, 75, 77, 78 |
| 57 | 60, 61, 68, 70 |
| 58 | 62, 64, 65, 67, 76, 79 |
| 59 | 68, 70 |
| 60 | 68, 70 |
| 61 | 64, 65, 67, 76, 79 |
| 62 | 66, 69, 71, 72, 73, 74, 75, 77, 78 |
| 63 | 67, 76, 79 |
| 64 | 67, 76, 79 |
| 65 | 69, 71, 72, 73, 74, 75, 77, 78 |
| 66 | 76, 79 |
| 67 | 70 |
| 68 | 71, 72, 73, 74, 75, 77, 78 |
| 70 | 73, 74, 75, 77, 78 |
| 71 | 74, 75, 77, 78 |
| 72 | 75, 77, 78 |
| 73 | 77, 78 |
| 74 | 77, 78 |

TABLE 2
List of exon regions: sequence stretches with (partially) high sequence identity or
similarity (at least 50%) between two different dystrophin exons, as identified as best
pairwise alignment by EMBOSS Matcher using default settings (Matrix: EDNAFULL, Gap_penalty:
16, Extend penalty: 4) (http://www.ebi.ac.uk/tools/psa/emboss_matcher/nucleotide.html).
The skipping of these exons, and preferably any exons in between, would result in an in-
frame DMD transcript (as in Table 1)

| | | SEQ |
|---|---|---|
| Target | | ID |
| Exons | EMBOSS Alignment | NO |
| 8 19 | [chemical structure] | 17 18 |
| 8 21 | [chemical structure] | 19 20 |
| 8 50 | [chemical structure] | 21 22 |
| 8 52 | [chemical structure] | 23 24 |
| 8 58 | [chemical structure] | 25 26 |
| 9 10 | [chemical structure] | 27 28 |
| 9 12 | [chemical structure] | 29 30 |
| 9 13 | [chemical structure] | 31 32 |
| 9 14 | [chemical structure] | 33 34 |
| 9 15 | [chemical structure] | 35 36 |
| 9 16 | [chemical structure] | 37 38 |
| 9 18 | [chemical structure] | 39 40 |
| 9 20 | [chemical structure] | 41 42 |
| 9 22 | [chemical structure] | 43 44 |
| 9 23 | [chemical structure] | 45 46 |
| 9 25 | [chemical structure] | 47 48 |
| 9 26 | [chemical structure] | 49 50 |
| 9 27 | [chemical structure] | 51 52 |
| 9 28 | [chemical structure] | 53 54 |
| 9 29 | [chemical structure] | 55 56 |
| 9 30 | [chemical structure] | 57 58 |
| 9 31 | [chemical structure] | 59 60 |
| 9 32 | [chemical structure] | 61 62 |
| 9 33 | [chemical structure] | 63 64 |
| 9 34 | [chemical structure] | 65 66 |
| 9 35 | [chemical structure] | 67 68 |
| 9 36 | [chemical structure] | 69 70 |
| 9 38 | [chemical structure] | 71 72 |
| 9 40 | [chemical structure] | 73 74 |
| 9 41 | [chemical structure] | 75 76 |
| 9 42 | [chemical structure] | 77 78 |
| 9 44 | [chemical structure] | 79 80 |
| 9 46 | [chemical structure] | 81 82 |
| 9 47 | [chemical structure] | 83 84 |
| 9 48 | [chemical structure] | 85 86 |
| 9 49 | [chemical structure] | 87 88 |
| 9 51 | [chemical structure] | 89 90 |
| 9 53 | [chemical structure] | 91 92 |
| 9 57 | [chemical structure] | 93 94 |
| 9 59 | [chemical structure] | 95 96 |
| 9 60 | [chemical structure] | 97 98 |
| 10 12 | [chemical structure] | 99 100 |
| 10 13 | [chemical structure] | 101 102 |
| 10 14 | [chemical structure] | 103 104 |
| 10 15 | [chemical structure] | 105 106 |
| 10 16 | [chemical structure] | 107 108 |
| 10 18 | [chemical structure] | 109 110 |
| 10 20 | [chemical structure] | 111 112 |
| 10 22 | [chemical structure] | 113 114 |
| 10 23 | [chemical structure] | 115 116 |
| 10 25 | [chemical structure] | 117 118 |
| 10 26 | [chemical structure] | 119 120 |
| 10 27 | [chemical structure] | 121 122 |
| 10 28 | [chemical structure] | 123 124 |
| 10 29 | [chemical structure] | 125 126 |
| 10 30 | [chemical structure] | 127 128 |
| 10 31 | [chemical structure] | 129 130 |
| 10 32 | [chemical structure] | 131 132 |
| 10 33 | [chemical structure] | 133 134 |
| 10 34 | [chemical structure] | 135 136 |
| 10 35 | [chemical structure] | 137 138 |
| 10 36 | [chemical structure] | 139 140 |
| 10 37 | [chemical structure] | 141 142 |
| 10 38 | [chemical structure] | 143 144 |
| 10 39 | [chemical structure] | 145 146 |
| 10 40 | [chemical structure] | 147 148 |
| 10 41 | [chemical structure] | 149 150 |
| 10 42 | [chemical structure] | |
| | [chemical structure] | 151 152 |
| 10 44 | [chemical structure] | 153 154 |
| 10 46 | [chemical structure] | 155 156 |
| 10 47 | [chemical structure] | 157 158 |
| 10 48 | [chemical structure] | 159 160 |
| 10 49 | [chemical structure] | 161 162 |
| 10 51 | [chemical structure] | 163 164 |
| 10 53 | [chemical structure] | 165 166 |
| 10 55 | [chemical structure] | 167 168 |
| 10 57 | [chemical structure] | 169 170 |
| 10 59 | [chemical structure] | 171 172 |
| 10 60 | [chemical structure] | 173 174 |
| 11 12 | [chemical structure] | 175 176 |
| 11 13 | [chemical structure] | 177 178 |
| 11 14 | [chemical structure] | 179 180 |
| 11 15 | [chemical structure] | 181 182 |
| 11 16 | [chemical structure] | 183 184 |
| 11 18 | [chemical structure] | 185 186 |
| 11 20 | [chemical structure] | 187 188 |
| 11 22 | [chemical structure] | 189 190 |
| 11 23 | [chemical structure] | 191 192 |
| 11 24 | [chemical structure] | 193 194 |
| 11 25 | [chemical structure] | 195 196 |
| 11 26 | [chemical structure] | 197 198 |
| 11 27 | [chemical structure] | 199 200 |
| 11 28 | [chemical structure] | 201 202 |
| 11 29 | [chemical structure] | 203 204 |
| 11 31 | [chemical structure] | 205 206 |
| 11 32 | [chemical structure] | 207 208 |
| 11 33 | [chemical structure] | 209 210 |
| 11 34 | [chemical structure] | 211 212 |
| 11 35 | [chemical structure] | 213 214 |
| 11 36 | [chemical structure] | 215 216 |
| 11 37 | [chemical structure] | 217 218 |
| 11 38 | [chemical structure] | 219 220 |
| 11 39 | [chemical structure] | 221 222 |
| 11 40 | [chemical structure] | 223 224 |
| 11 41 | [chemical structure] | 225 226 |
| 11 42 | [chemical structure] | 227 228 |
| 11 44 | [chemical structure] | 229 230 |
| 11 46 | [chemical structure] | 231 232 |
| 11 47 | [chemical structure] | 233 234 |
| 11 48 | [chemical structure] | 235 236 |
| 11 49 | [chemical structure] | 237 238 |
| 11 51 | [chemical structure] | 239 240 |
| 11 53 | [chemical structure] | 241 242 |
| 11 55 | [chemical structure] | 243 244 |
| 11 57 | [chemical structure] | 245 246 |
| 11 59 | [chemical structure] | |
| | [chemical structure] | 247 248 |
| 11 60 | [chemical structure] | 249 250 |
| 12 17 | [chemical structure] | 251 252 |
| 12 43 | [chemical structure] | 253 254 |
| 12 45 | [chemical structure] | 255 256 |
| 12 54 | [chemical structure] | 257 258 |
| 12 56 | [chemical structure] | 259 260 |
| 13 15 | [chemical structure] | 261 262 |
| 13 16 | [chemical structure] | 263 264 |
| 13 18 | [chemical structure] | 265 266 |
| 13 20 | [chemical structure] | 267 268 |
| 13 22 | [chemical structure] | 269 270 |
| 13 23 | [chemical structure] | 271 272 |
| 13 24 | [chemical structure] | 273 274 |
| 13 25 | [chemical structure] | 275 276 |
| 13 26 | [chemical structure] | 277 278 |
| 13 27 | [chemical structure] | 279 280 |
| 13 28 | [chemical structure] | 281 282 |
| 13 29 | [chemical structure] | 283 284 |
| 13 30 | [chemical structure] | 285 286 |
| 13 31 | [chemical structure] | 287 288 |
| 13 32 | [chemical structure] | 289 290 |
| 13 34 | [chemical structure] | 291 292 |
| 13 35 | [chemical structure] | 293 294 |
| 13 36 | [chemical structure] | 295 296 |
| 13 37 | [chemical structure] | 297 298 |
| 13 38 | [chemical structure] | 299 300 |
| 13 39 | [chemical structure] | 301 302 |
| 13 40 | [chemical structure] | 303 304 |
| 13 41 | [chemical structure] | 305 306 |
| 13 42 | [chemical structure] | 307 308 |
| 13 44 | [chemical structure] | 309 310 |
| 13 46 | [chemical structure] | 311 312 |
| 13 47 | [chemical structure] | 313 314 |
| 13 48 | [chemical structure] | 315 316 |
| 13 49 | [chemical structure] | 317 318 |
| 13 51 | [chemical structure] | 319 320 |
| 13 53 | [chemical structure] | 321 322 |
| 13 55 | [chemical structure] | 323 323 |
| 13 57 | [chemical structure] | 324 325 |
| 13 59 | [chemical structure] | 326 327 |
| 13 60 | [chemical structure] | 328 329 |
| 14 15 | [chemical structure] | 330 331 |
| 14 16 | [chemical structure] | 332 333 |
| 14 18 | [chemical structure] | 334 335 |
| 14 20 | [chemical structure] | 336 337 |
| 14 22 | [chemical structure] | 338 339 |
| 14 23 | [chemical structure] | 340 341 |
| 14 24 | [chemical structure] | 342 343 |
| 14 25 | [chemical structure] | 344 345 |
| 14 27 | [chemical structure] | 346 347 |
| 14 28 | [chemical structure] | 348 349 |
| 14 29 | [chemical structure] | 350 351 |
| 14 30 | [chemical structure] | 352 353 |
| 14 31 | [chemical structure] | 354 355 |
| 14 32 | [chemical structure] | 356 357 |
| 14 33 | [chemical structure] | 358 359 |
| 14 34 | [chemical structure] | 360 361 |
| 14 35 | [chemical structure] | 362 363 |
| 14 36 | [chemical structure] | 364 365 |
| 14 37 | [chemical structure] | 366 367 |
| 14 38 | [chemical structure] | 368 369 |
| 14 39 | [chemical structure] | 370 371 |
| 14 40 | [chemical structure] | 372 373 |
| 14 41 | [chemical structure] | 374 375 |
| 14 42 | [chemical structure] | 376 377 |
| 14 44 | [chemical structure] | 378 379 |
| 14 46 | [chemical structure] | 380 381 |
| 14 47 | [chemical structure] | 382 383 |
| 14 48 | [chemical structure] | 384 385 |
| 14 49 | [chemical structure] | 386 387 |
| 14 51 | [chemical structure] | 388 389 |
| 14 53 | [chemical structure] | 390 391 |
| 14 55 | [chemical structure] | 392 393 |
| 14 57 | [chemical structure] | 394 395 |
| 14 59 | [chemical structure] | 396 397 |
| 14 60 | [chemical structure] | 398 399 |
| 15 16 | [chemical structure] | 400 401 |
| 15 18 | [chemical structure] | 402 403 |
| 15 20 | [chemical structure] | 404 405 |
| 15 23 | [chemical structure] | 406 407 |
| 15 24 | [chemical structure] | 408 409 |
| 15 25 | [chemical structure] | 410 411 |
| 15 26 | [chemical structure] | 412 413 |
| 15 27 | [chemical structure] | 414 415 |
| 15 28 | [chemical structure] | 416 417 |
| 15 29 | [chemical structure] | 418 419 |
| 15 30 | [chemical structure] | 420 421 |
| 15 31 | [chemical structure] | 422 423 |
| 15 32 | [chemical structure] | 424 425 |
| 15 33 | [chemical structure] | 426 427 |
| 15 34 | [chemical structure] | 428 429 |
| 15 35 | [chemical structure] | 430 431 |
| 15 36 | [chemical structure] | 432 433 |
| 15 37 | [chemical structure] | 434 435 |
| 15 38 | [chemical structure] | 436 437 |
| 15 39 | [chemical structure] | 438 439 |
| 15 40 | [chemical structure] | 440 441 |
| 15 41 | [chemical structure] | 442 443 |
| 15 42 | [chemical structure] | 444 445 |
| 15 44 | [chemical structure] | 446 447 |
| 15 46 | [chemical structure] | 448 449 |
| 15 47 | [chemical structure] | 450 451 |
| 15 48 | [chemical structure] | 452 453 |
| 15 49 | [chemical structure] | 454 455 |
| 15 51 | [chemical structure] | 456 457 |
| 15 53 | [chemical structure] | 458 459 |
| 15 55 | [chemical structure] | 460 461 |
| 15 57 | [chemical structure] | 462 463 |
| 15 59 | [chemical structure] | 464 465 |
| 15 60 | [chemical structure] | 466 467 |
| 16 18 | [chemical structure] | 468 469 |
| 16 20 | [chemical structure] | 470 471 |
| 16 22 | [chemical structure] | 472 473 |
| 16 23 | [chemical structure] | 474 475 |
| 16 24 | [chemical structure] | 476 477 |
| 16 25 | [chemical structure] | 478 479 |
| 16 26 | [chemical structure] | 480 481 |
| 16 27 | [chemical structure] | 482 483 |
| 16 28 | [chemical structure] | 484 485 |
| 16 29 | [chemical structure] | 486 487 |
| 16 30 | [chemical structure] | 488 489 |
| 16 31 | [chemical structure] | 490 491 |
| 16 32 | [chemical structure] | 492 493 |
| 16 33 | [chemical structure] | 494 495 |
| 16 34 | [chemical structure] | 496 497 |
| 16 36 | [chemical structure] | 498 499 |
| 16 37 | [chemical structure] | 500 501 |
| 16 38 | [chemical structure] | 502 503 |
| 16 39 | [chemical structure] | 504 505 |
| 16 40 | [chemical structure] | 506 507 |
| 16 41 | [chemical structure] | 508 509 |
| 16 42 | [chemical structure] | 510 511 |
| 16 44 | [chemical structure] | 512 513 |
| 16 46 | [chemical structure] | 514 515 |
| 16 47 | [chemical structure] | 516 517 |
| 16 48 | [chemical structure] | 518 519 |
| 16 49 | [chemical structure] | 520 521 |
| 16 51 | [chemical structure] | 522 523 |
| 16 53 | [chemical structure] | 524 525 |
| 16 55 | [chemical structure] | 526 527 |
| 16 57 | [chemical structure] | 528 529 |
| 16 59 | [chemical structure] | 530 531 |
| 16 60 | [chemical structure] | 532 533 |
| 17 18 | [chemical structure] | 534 535 |
| 17 20 | [chemical structure] | 536 537 |
| 17 22 | [chemical structure] | 538 539 |
| 17 23 | [chemical structure] | 540 541 |
| 17 24 | [chemical structure] | 542 543 |
| 17 25 | [chemical structure] | 544 545 |
| 17 27 | [chemical structure] | 546 547 |
| 17 28 | [chemical structure] | 548 549 |
| 17 29 | [chemical structure] | 550 551 |
| 17 30 | [chemical structure] | 552 553 |
| 17 31 | [chemical structure] | 554 555 |
| 17 32 | [chemical structure] | 556 557 |
| 17 33 | [chemical structure] | 558 559 |
| 17 34 | [chemical structure] | 560 561 |
| 17 35 | [chemical structure] | 562 563 |
| 17 36 | [chemical structure] | 564 565 |
| 17 37 | [chemical structure] | 566 567 |
| 17 38 | [chemical structure] | 568 569 |
| 17 39 | [chemical structure] | 570 571 |
| 17 40 | [chemical structure] | 572 573 |
| 17 41 | [chemical structure] | 574 575 |
| 17 42 | [chemical structure] | 576 577 |
| 17 44 | [chemical structure] | 578 579 |
| 17 46 | [chemical structure] | 580 581 |
| 17 47 | [chemical structure] | 582 583 |
| 17 48 | [chemical structure] | 584 585 |
| 17 49 | [chemical structure] | 586 587 |
| 17 51 | [chemical structure] | 588 589 |
| 17 53 | [chemical structure] | 590 591 |
| 17 55 | [chemical structure] | 592 593 |
| 17 57 | [chemical structure] | 594 595 |
| 17 59 | [chemical structure] | 596 597 |
| 17 60 | [chemical structure] | 598 599 |
| 18 41 | [chemical structure] | 600 601 |
| 18 45 | [chemical structure] | 602 603 |
| 18 54 | [chemical structure] | 604 605 |
| 18 56 | [chemical structure] | 606 607 |
| 19 20 | [chemical structure] | 608 609 |
| 19 22 | [chemical structure] | 610 611 |
| 19 23 | [chemical structure] | 612 613 |
| 19 24 | [chemical structure] | 614 615 |
| 19 25 | [chemical structure] | 616 617 |
| 19 26 | [chemical structure] | 618 619 |
| 19 28 | [chemical structure] | 620 621 |
| 19 29 | [chemical structure] | 622 623 |
| 19 30 | [chemical structure] | 624 625 |
| 19 31 | [chemical structure] | 626 627 |
| 19 32 | [chemical structure] | 628 629 |
| 19 33 | [chemical structure] | 630 631 |
| 19 34 | [chemical structure] | 632 633 |
| 19 35 | [chemical structure] | 634 635 |
| 19 37 | [chemical structure] | 636 637 |
| 19 38 | [chemical structure] | 638 639 |
| 19 39 | [chemical structure] | 640 641 |
| 19 40 | [chemical structure] | 642 643 |
| 19 41 | [chemical structure] | 644 645 |
| 19 42 | [chemical structure] | 646 647 |
| 19 44 | [chemical structure] | 648 649 |
| 19 46 | [chemical structure] | 650 651 |
| 19 47 | [chemical structure] | 652 653 |
| 19 49 | [chemical structure] | 654 655 |
| 19 53 | [chemical structure] | 656 657 |
| 19 55 | [chemical structure] | 658 659 |
| 19 57 | [chemical structure] | 660 661 |
| 19 59 | [chemical structure] | 662 663 |
| 19 60 | [chemical structure] | 664 665 |
| 20 21 | [chemical structure] | 666 667 |
| 20 50 | [chemical structure] | 668 669 |
| 20 52 | [chemical structure] | 670 671 |
| 20 58 | [chemical structure] | 672 673 |
| 21 22 | [chemical structure] | 674 675 |
| 21 23 | [chemical structure] | 676 677 |
| 21 24 | [chemical structure] | 678 679 |
| 21 25 | [chemical structure] | 680 681 |
| 21 26 | [chemical structure] | 682 683 |
| 21 27 | [chemical structure] | 684 685 |
| 21 28 | [chemical structure] | 686 687 |
| 21 29 | [chemical structure] | 688 689 |
| 21 30 | [chemical structure] | 690 691 |
| 21 31 | [chemical structure] | 692 693 |
| 21 32 | [chemical structure] | 694 695 |
| 21 33 | [chemical structure] | 696 697 |
| 21 34 | [chemical structure] | 698 699 |
| 21 35 | [chemical structure] | 700 701 |
| 21 36 | [chemical structure] | 702 703 |
| 21 39 | [chemical structure] | 704 705 |
| 21 40 | [chemical structure] | 706 707 |
| 21 41 | [chemical structure] | 708 709 |
| 21 42 | [chemical structure] | 710 711 |
| 21 44 | [chemical structure] | 712 713 |
| 21 46 | [chemical structure] | 714 715 |
| 21 47 | [chemical structure] | 716 717 |
| 21 48 | [chemical structure] | 718 719 |
| 21 49 | [chemical structure] | 720 721 |
| 21 51 | [chemical structure] | 722 723 |
| 21 53 | [chemical structure] | 724 725 |
| 21 55 | [chemical structure] | 726 727 |
| 21 57 | [chemical structure] | 728 729 |
| 21 59 | [chemical structure] | 730 731 |
| 21 60 | [chemical structure] | 732 733 |
| 22 50 | [chemical structure] | 734 735 |
| 22 52 | [chemical structure] | 736 737 |
| 22 58 | [chemical structure] | 738 739 |
| 23 24 | [chemical structure] | 740 741 |
| 23 25 | [chemical structure] | 742 743 |
| 23 26 | [chemical structure] | 744 745 |
| 23 27 | [chemical structure] | 746 747 |
| 23 28 | [chemical structure] | 748 749 |
| 23 29 | [chemical structure] | 750 751 |
| 23 30 | [chemical structure] | 752 753 |
| 23 31 | [chemical structure] | 754 755 |
| 23 32 | [chemical structure] | 756 757 |
| 23 33 | [chemical structure] | 758 759 |
| 23 34 | [chemical structure] | |
| | [chemical structure] | 760 761 |
| 23 35 | [chemical structure] | 762 763 |
| 23 36 | [chemical structure] | 764 765 |
| 23 37 | [chemical structure] | 766 767 |
| 23 38 | [chemical structure] | 768 769 |
| 23 39 | [chemical structure] | 770 771 |
| 23 40 | [chemical structure] | 772 773 |
| 23 41 | [chemical structure] | 774 775 |
| 23 42 | [chemical structure] | 776 777 |
| 23 44 | [chemical structure] | 778 779 |
| 23 46 | [chemical structure] | 780 781 |
| 23 47 | [chemical structure] | 782 783 |
| 23 48 | [chemical structure] | 784 785 |
| 23 49 | [chemical structure] | 786 787 |
| 23 51 | [chemical structure] | 788 789 |
| 23 53 | [chemical structure] | 790 791 |
| 23 55 | [chemical structure] | 792 793 |
| 23 57 | [chemical structure] | 794 795 |
| 23 59 | [chemical structure] | 796 797 |
| 23 60 | [chemical structure] | 798 799 |
| 24 25 | [chemical structure] | 800 801 |
| 24 26 | [chemical structure] | 802 803 |
| 24 27 | [chemical structure] | 804 805 |
| 24 28 | [chemical structure] | 806 807 |
| 24 29 | [chemical structure] | 808 809 |
| 24 30 | [chemical structure] | 810 811 |
| 24 31 | [chemical structure] | 812 813 |
| 24 32 | [chemical structure] | 814 815 |
| 24 33 | [chemical structure] | 816 817 |
| 24 34 | [chemical structure] | 818 819 |
| 24 35 | [chemical structure] | 820 821 |
| 24 36 | [chemical structure] | 822 823 |
| 24 38 | [chemical structure] | 824 825 |
| 24 39 | [chemical structure] | 826 827 |
| 24 40 | [chemical structure] | 828 829 |
| 24 41 | [chemical structure] | 830 831 |
| 24 42 | [chemical structure] | 832 833 |
| 24 44 | [chemical structure] | 834 835 |
| 24 46 | [chemical structure] | 836 837 |
| 24 47 | [chemical structure] | 838 839 |
| 24 48 | [chemical structure] | 840 841 |
| 24 49 | [chemical structure] | 842 843 |
| 24 51 | [chemical structure] | 844 845 |
| 24 53 | [chemical structure] | 846 847 |
| 24 55 | [chemical structure] | 848 849 |
| 24 57 | [chemical structure] | 850 851 |
| 24 59 | [chemical structure] | 852 853 |
| 25 26 | [chemical structure] | 854 855 |
| 25 27 | [chemical structure] | 856 857 |
| 25 29 | [chemical structure] | 858 859 |
| 25 30 | [chemical structure] | 860 861 |
| 25 31 | [chemical structure] | 862 863 |
| 25 32 | [chemical structure] | 864 865 |
| 25 33 | [chemical structure] | 866 867 |
| 25 34 | [chemical structure] | 868 869 |
| 25 35 | [chemical structure] | 870 871 |
| 25 36 | [chemical structure] | 872 873 |
| 25 37 | [chemical structure] | 874 875 |
| 25 38 | [chemical structure] | 876 877 |
| 25 39 | [chemical structure] | 878 879 |
| 25 40 | [chemical structure] | 880 881 |
| 25 41 | [chemical structure] | 882 883 |
| 25 42 | [chemical structure] | 884 885 |
| 25 44 | [chemical structure] | 886 887 |
| 25 46 | [chemical structure] | 888 889 |
| 25 47 | [chemical structure] | 890 891 |
| 25 48 | [chemical structure] | 892 893 |
| 25 49 | [chemical structure] | 894 895 |
| 25 51 | [chemical structure] | 896 897 |
| 25 53 | [chemical structure] | 898 899 |
| 25 55 | [chemical structure] | 900 901 |
| 25 57 | [chemical structure] | 902 903 |
| 25 59 | [chemical structure] | 904 905 |
| 26 27 | [chemical structure] | 906 907 |
| 26 28 | [chemical structure] | 908 909 |
| 26 29 | [chemical structure] | 910 911 |
| 26 31 | [chemical structure] | 912 913 |
| 26 32 | [chemical structure] | 914 915 |
| 26 33 | [chemical structure] | 916 917 |
| 26 34 | [chemical structure] | 918 919 |
| 26 35 | [chemical structure] | 920 921 |
| 26 36 | [chemical structure] | 922 923 |
| 26 37 | [chemical structure] | 924 925 |
| 26 38 | [chemical structure] | 926 927 |
| 26 39 | [chemical structure] | 928 929 |
| 26 40 | [chemical structure] | 930 931 |
| 26 41 | [chemical structure] | 932 933 |
| 26 42 | [chemical structure] | 934 935 |
| 26 44 | [chemical structure] | 936 937 |
| 26 46 | [chemical structure] | 938 939 |
| 26 47 | [chemical structure] | 940 941 |
| 26 48 | [chemical structure] | 942 943 |
| 26 49 | [chemical structure] | 944 945 |
| 26 51 | [chemical structure] | 946 947 |
| 26 53 | [chemical structure] | 948 949 |
| 26 55 | [chemical structure] | 950 951 |
| 26 57 | [chemical structure] | 952 953 |
| 26 59 | [chemical structure] | 954 955 |
| 27 28 | [chemical structure] | 956 957 |
| 27 29 | [chemical structure] | 958 959 |
| 27 30 | [chemical structure] | 960 961 |
| 27 31 | [chemical structure] | 962 963 |
| 27 32 | [chemical structure] | 964 965 |
| 27 33 | [chemical structure] | 966 967 |
| 27 34 | [chemical structure] | 968 969 |
| 27 35 | [chemical structure] | 970 971 |
| 27 36 | [chemical structure] | 972 973 |
| 27 37 | [chemical structure] | 974 975 |
| 27 38 | [chemical structure] | 976 977 |
| 27 39 | [chemical structure] | 978 979 |
| 27 40 | [chemical structure] | 980 981 |
| 27 41 | [chemical structure] | 982 983 |
| 27 42 | [chemical structure] | 984 985 |
| 27 44 | [chemical structure] | 986 987 |
| 27 46 | [chemical structure] | 988 989 |
| 27 47 | [chemical structure] | 990 991 |
| 27 48 | [chemical structure] | 992 993 |
| 27 49 | [chemical structure] | 994 995 |
| 27 51 | [chemical structure] | 996 997 |
| 27 53 | [chemical structure] | 998 999 |
| 27 55 | [chemical structure] | 1000 1001 |
| 27 57 | [chemical structure] | 1002 1003 |
| 27 59 | [chemical structure] | 1004 1005 |
| 27 60 | [chemical structure] | 1006 1007 |
| 28 29 | [chemical structure] | 1008 1009 |
| 28 30 | [chemical structure] | 1010 1011 |
| 28 31 | [chemical structure] | 1012 1013 |
| 28 32 | [chemical structure] | 1014 1015 |
| 28 33 | [chemical structure] | 1016 1017 |
| 28 34 | [chemical structure] | 1018 1019 |
| 28 35 | [chemical structure] | 1020 1021 |
| 28 36 | [chemical structure] | 1022 1023 |
| 28 37 | [chemical structure] | 1024 1025 |
| 28 38 | [chemical structure] | 1026 1027 |
| 28 39 | [chemical structure] | 1028 1029 |
| 28 40 | [chemical structure] | 1030 1031 |
| 28 41 | [chemical structure] | 1032 1033 |
| 28 42 | [chemical structure] | 1034 1035 |
| 28 44 | [chemical structure] | 1036 1037 |
| 28 46 | [chemical structure] | 1038 1039 |
| 28 47 | [chemical structure] | 1040 1041 |
| 28 48 | [chemical structure] | 1042 1043 |
| 28 49 | [chemical structure] | 1044 1045 |
| 28 51 | [chemical structure] | 1046 1047 |
| 28 53 | [chemical structure] | 1048 1049 |
| 28 55 | [chemical structure] | 1050 1051 |
| 28 57 | [chemical structure] | 1052 1053 |
| 28 59 | [chemical structure] | 1054 1055 |
| 29 30 | [chemical structure] | 1056 1057 |
| 29 31 | [chemical structure] | 1058 1059 |
| 29 32 | [chemical structure] | 1060 1061 |
| 29 33 | [chemical structure] | 1062 1063 |
| 29 34 | [chemical structure] | 1064 1065 |
| 29 35 | [chemical structure] | 1066 1067 |
| 29 36 | [chemical structure] | 1068 1069 |
| 29 37 | [chemical structure] | 1070 1071 |
| 29 38 | [chemical structure] | 1072 1073 |
| 29 39 | [chemical structure] | 1074 1075 |
| 29 40 | [chemical structure] | 1076 1077 |
| 29 41 | [chemical structure] | 1078 1079 |
| 29 42 | [chemical structure] | 1080 1081 |
| 29 44 | [chemical structure] | 1082 1083 |
| 29 46 | [chemical structure] | 1084 1085 |
| 29 47 | [chemical structure] | 1086 1087 |
| 29 48 | [chemical structure] | 1088 1089 |
| 29 49 | [chemical structure] | 1090 1091 |
| 29 51 | [chemical structure] | 1092 1093 |
| 29 53 | [chemical structure] | 1094 1095 |
| 29 55 | [chemical structure] | 1096 1097 |
| 29 57 | [chemical structure] | 1098 1099 |
| 29 59 | [chemical structure] | 1100 1101 |
| 30 31 | [chemical structure] | 1102 1103 |
| 30 32 | [chemical structure] | 1104 1105 |
| 30 33 | [chemical structure] | 1106 1107 |
| 30 34 | [chemical structure] | 1108 1109 |
| 30 35 | [chemical structure] | 1110 1111 |
| 30 36 | [chemical structure] | 1112 1113 |
| 30 37 | [chemical structure] | 1114 1115 |
| 30 38 | [chemical structure] | 1116 1117 |
| 30 39 | [chemical structure] | 1116 1117 |
| 30 40 | [chemical structure] | 1118 1119 |
| 30 41 | [chemical structure] | 1120 1121 |
| 30 42 | [chemical structure] | 1122 1123 |
| 30 44 | [chemical structure] | 1124 1125 |
| 30 46 | [chemical structure] | 1126 1127 |
| 30 47 | [chemical structure] | 1128 1129 |
| 30 48 | [chemical structure] | 1130 1131 |
| 30 49 | [chemical structure] | 1132 1133 |
| 30 51 | [chemical structure] | 1134 1135 |
| 30 53 | [chemical structure] | 1136 1137 |
| 30 55 | [chemical structure] | 1138 1139 |
| 30 57 | [chemical structure] | 1140 1141 |
| 30 59 | [chemical structure] | 1142 1143 |
| 30 60 | [chemical structure] | 1144 1145 |
| 31 32 | [chemical structure] | 1146 1147 |
| 31 33 | [chemical structure] | 1148 1149 |
| 31 34 | [chemical structure] | 1150 1151 |
| 31 35 | [chemical structure] | 1152 1153 |
| 31 36 | [chemical structure] | 1154 1155 |
| 31 37 | [chemical structure] | 1156 1157 |
| 31 38 | [chemical structure] | 1158 1159 |
| 31 39 | [chemical structure] | 1160 1161 |
| 31 40 | [chemical structure] | 1162 1163 |
| 31 41 | [chemical structure] | 1164 1165 |
| 31 42 | [chemical structure] | 1166 1167 |
| 31 44 | [chemical structure] | 1168 1169 |
| 31 46 | [chemical structure] | 1170 1171 |
| 31 47 | [chemical structure] | 1172 1173 |
| 31 48 | [chemical structure] | 1174 1175 |
| 31 49 | [chemical structure] | 1176 1177 |
| 31 51 | [chemical structure] | 1178 1179 |
| 31 53 | [chemical structure] | 1180 1181 |
| 31 55 | [chemical structure] | 1182 1183 |
| 31 57 | [chemical structure] | 1184 1185 |
| 31 59 | [chemical structure] | 1186 1187 |
| 31 60 | [chemical structure] | 1188 1189 |
| 32 33 | [chemical structure] | 1190 1191 |
| 32 34 | [chemical structure] | 1192 1193 |
| 32 35 | [chemical structure] | 1194 1195 |
| 32 36 | [chemical structure] | 1196 1197 |
| 32 37 | [chemical structure] | 1198 1199 |
| 32 38 | [chemical structure] | 1200 1201 |
| 32 39 | [chemical structure] | 1202 1203 |
| 32 40 | [chemical structure] | 1204 1205 |
| 32 41 | [chemical structure] | 1206 1207 |
| 32 42 | [chemical structure] | 1208 1209 |
| 32 44 | [chemical structure] | 1210 1211 |
| 32 46 | [chemical structure] | 1212 1213 |
| 32 47 | [chemical structure] | 1214 1215 |
| 32 48 | [chemical structure] | 1216 1217 |
| 32 49 | [chemical structure] | 1218 1219 |
| 32 51 | [chemical structure] | 1220 1221 |
| 32 53 | [chemical structure] | 1222 1223 |
| 32 55 | [chemical structure] | 1224 1225 |
| 32 57 | [chemical structure] | 1226 1227 |
| 32 59 | [chemical structure] | 1228 1229 |
| 32 60 | [chemical structure] | 1230 1231 |
| 33 34 | [chemical structure] | 1232 1233 |
| 33 35 | [chemical structure] | 1234 1235 |
| 33 38 | [chemical structure] | 1236 1237 |
| 33 39 | [chemical structure] | 1238 1239 |
| 33 40 | [chemical structure] | 1240 1241 |
| 33 41 | [chemical structure] | 1242 1243 |
| 33 42 | [chemical structure] | 1244 1245 |
| 33 44 | [chemical structure] | 1246 1247 |
| 33 46 | [chemical structure] | 1248 1249 |
| 33 47 | [chemical structure] | 1250 1251 |
| 33 48 | [chemical structure] | 1252 1253 |
| 33 49 | [chemical structure] | 1254 1255 |
| 33 51 | [chemical structure] | 1256 1257 |
| 33 53 | [chemical structure] | 1258 1259 |
| 33 55 | [chemical structure] | 1260 1261 |
| 33 57 | [chemical structure] | 1262 1263 |
| 33 59 | [chemical structure] | 1264 1265 |
| 33 60 | [chemical structure] | 1266 1267 |
| 34 35 | [chemical structure] | 1268 1269 |
| 34 36 | [chemical structure] | 1270 1271 |
| 34 37 | [chemical structure] | 1272 1273 |
| 34 38 | [chemical structure] | 1274 1275 |
| 34 39 | [chemical structure] | 1276 1277 |
| 34 41 | [chemical structure] | 1278 1279 |
| 34 42 | [chemical structure] | 1280 1281 |
| 34 44 | [chemical structure] | 1282 1283 |
| 34 46 | [chemical structure] | 1284 1285 |
| 34 47 | [chemical structure] | 1286 1287 |
| 34 48 | [chemical structure] | 1288 1289 |
| 34 49 | [chemical structure] | 1290 1291 |
| 34 51 | [chemical structure] | 1292 1993 |
| 34 53 | [chemical structure] | 1294 1295 |
| 34 55 | [chemical structure] | 1296 1297 |
| 34 57 | [chemical structure] | 1298 1299 |
| 34 59 | [chemical structure] | 1300 1301 |
| 34 60 | [chemical structure] | 1302 1303 |
| 35 36 | [chemical structure] | 1304 1305 |
| 35 37 | [chemical structure] | 1306 1307 |
| 35 38 | [chemical structure] | 1308 1309 |
| 35 39 | [chemical structure] | 1310 1311 |
| 35 40 | [chemical structure] | 1312 1313 |
| 35 41 | [chemical structure] | 1314 1315 |
| 35 42 | [chemical structure] | 1316 1317 |
| 35 44 | [chemical structure] | 1318 1319 |
| 35 46 | [chemical structure] | 1320 1321 |
| 35 47 | [chemical structure] | 1322 1323 |
| 35 48 | [chemical structure] | 1324 1325 |
| 35 49 | [chemical structure] | 1326 1327 |
| 35 51 | [chemical structure] | 1328 1329 |
| 35 53 | [chemical structure] | 1330 1331 |
| 35 55 | [chemical structure] | 1332 1333 |
| 35 57 | [chemical structure] | 1334 1335 |
| 35 59 | [chemical structure] | 1336 1337 |
| 35 60 | [chemical structure] | 1338 1339 |
| 36 37 | [chemical structure] | 1340 1341 |
| 36 38 | [chemical structure] | 1342 1343 |
| 36 39 | [chemical structure] | 1344 1345 |
| 36 40 | [chemical structure] | 1346 1347 |
| 36 41 | [chemical structure] | 1348 1349 |
| 36 42 | [chemical structure] | 1350 1351 |
| 36 44 | [chemical structure] | 1352 1353 |
| 36 46 | [chemical structure] | 1354 1355 |
| 36 47 | [chemical structure] | 1356 1357 |
| 36 48 | [chemical structure] | 1358 1359 |
| 36 49 | [chemical structure] | 1360 1361 |
| 36 51 | [chemical structure] | 1362 1363 |
| 36 53 | [chemical structure] | 1364 1365 |
| 36 55 | [chemical structure] | 1366 1367 |
| 36 57 | [chemical structure] | 1368 1369 |
| 36 59 | [chemical structure] | 1370 1371 |
| 36 60 | [chemical structure] | 1372 1373 |
| 37 38 | [chemical structure] | 1374 1375 |
| 37 39 | [chemical structure] | 1376 1377 |
| 37 40 | [chemical structure] | 1378 1379 |
| 37 41 | [chemical structure] | 1380 1381 |
| 37 42 | [chemical structure] | 1382 1383 |
| 37 44 | [chemical structure] | 1384 1385 |
| 37 46 | [chemical structure] | 1386 1387 |
| 37 47 | [chemical structure] | 1388 1389 |
| 37 48 | [chemical structure] | 1390 1391 |
| 37 49 | [chemical structure] | 1392 1393 |
| 37 53 | [chemical structure] | 1394 1395 |
| 37 55 | [chemical structure] | 1396 1397 |
| 37 57 | [chemical structure] | 1398 1399 |
| 37 59 | [chemical structure] | 1400 1401 |
| 37 60 | [chemical structure] | 1402 1403 |
| 38 39 | [chemical structure] | 1404 1406 |
| 38 40 | [chemical structure] | 1407 1408 |
| 38 41 | [chemical structure] | 1409 1410 |
| 38 42 | [chemical structure] | 1411 1412 |
| 38 44 | [chemical structure] | 1413 1414 |
| 38 46 | [chemical structure] | 1415 1416 |
| 38 47 | [chemical structure] | 1417 1418 |
| 38 48 | [chemical structure] | 1419 1420 |
| 38 49 | [chemical structure] | 1421 1422 |
| 38 51 | [chemical structure] | 1423 1424 |
| 38 53 | [chemical structure] | 1425 1426 |
| 38 55 | [chemical structure] | 1427 1428 |
| 38 57 | [chemical structure] | 1429 1430 |
| 38 59 | [chemical structure] | 1431 1432 |
| 38 60 | [chemical structure] | 1433 1434 |
| 39 40 | [chemical structure] | 1435 1436 |
| 39 41 | [chemical structure] | 1437 1438 |
| 39 44 | [chemical structure] | 1439 1440 |
| 39 46 | [chemical structure] | 1441 1442 |
| 39 47 | [chemical structure] | 1443 1444 |
| 39 48 | [chemical structure] | 1445 1446 |
| 39 49 | [chemical structure] | 1447 1448 |
| 39 51 | [chemical structure] | 1449 1450 |
| 39 53 | [chemical structure] | 1451 1452 |
| 39 55 | [chemical structure] | 1453 1454 |
| 39 57 | [chemical structure] | 1455 1456 |
| 39 59 | [chemical structure] | 1457 1458 |
| 39 60 | [chemical structure] | 1459 1460 |
| 40 41 | [chemical structure] | 1461 1462 |
| 40 42 | [chemical structure] | 1463 1464 |
| 40 44 | [chemical structure] | 1465 1466 |
| 40 46 | [chemical structure] | 1467 1468 |
| 40 47 | [chemical structure] | 1469 1470 |
| 40 48 | [chemical structure] | 1471 1472 |
| 40 49 | [chemical structure] | 1473 1474 |
| 40 51 | [chemical structure] | 1475 1476 |
| 40 53 | [chemical structure] | 1477 1478 |
| 40 55 | [chemical structure] | 1479 1480 |
| 40 57 | [chemical structure] | 1481 1482 |
| 40 59 | [chemical structure] | |
| | [chemical structure] | 1483 1484 |
| 40 60 | [chemical structure] | 1485 1486 |
| 41 42 | [chemical structure] | 1487 1488 |
| 41 44 | [chemical structure] | 1489 1490 |
| 41 46 | [chemical structure] | 1491 1492 |
| 41 47 | [chemical structure] | 1493 1494 |
| 41 48 | [chemical structure] | 1495 1496 |
| 41 49 | [chemical structure] | 1497 1498 |
| 41 53 | [chemical structure] | 1499 1500 |
| 41 53 | [chemical structure] | 1501 1502 |
| 41 57 | [chemical structure] | 1503 1504 |
| 41 59 | [chemical structure] | 1505 1506 |
| 41 60 | [chemical structure] | 1507 1508 |
| 42 44 | [chemical structure] | 1509 1510 |
| 42 46 | [chemical structure] | 1511 1512 |
| 42 47 | [chemical structure] | 1513 1514 |
| 42 48 | [chemical structure] | 1515 1516 |
| 42 49 | [chemical structure] | 1517 1518 |
| 42 51 | [chemical structure] | 1519 1520 |
| 42 53 | [chemical structure] | 1521 1522 |
| 42 55 | [chemical structure] | 1523 1524 |
| 42 57 | [chemical structure] | 1525 1526 |
| 42 59 | [chemical structure] | 1527 1528 |
| 42 60 | [chemical structure] | 1529 1530 |
| 43 44 | [chemical structure] | 1531 1532 |
| 43 46 | [chemical structure] | 1533 1534 |
| 43 47 | [chemical structure] | 1535 1536 |
| 43 48 | [chemical structure] | 1537 1538 |
| 43 49 | [chemical structure] | 1539 1540 |
| 43 51 | [chemical structure] | 1541 1542 |
| 43 53 | [chemical structure] | 1543 1544 |
| 43 55 | [chemical structure] | 1545 1546 |
| 43 57 | [chemical structure] | 1547 1548 |
| 43 59 | [chemical structure] | 1549 1550 |
| 43 60 | [chemical structure] | 1551 1552 |
| 44 45 | [chemical structure] | 1553 1554 |
| 44 54 | [chemical structure] | 1555 1556 |
| 44 56 | [chemical structure] | 1557 1558 |
| 45 46 | [chemical structure] | 1559 1560 |
| 45 47 | [chemical structure] | 1561 1562 |
| 45 48 | [chemical structure] | 1563 1564 |
| 45 49 | [chemical structure] | 1565 1566 |
| 45 51 | [chemical structure] | 1567 1568 |
| 45 53 | [chemical structure] | 1569 1570 |
| 45 55 | [chemical structure] | 1571 1572 |
| 45 57 | [chemical structure] | 1573 1574 |
| 45 59 | [chemical structure] | 1575 1576 |
| 45 60 | [chemical structure] | 1577 1578 |
| 46 54 | [chemical structure] | 1579 1580 |
| 46 56 | [chemical structure] | 1581 1582 |
| 47 48 | [chemical structure] | 1583 1584 |
| 47 49 | [chemical structure] | 1585 1586 |
| 47 51 | [chemical structure] | 1587 1588 |
| 47 53 | [chemical structure] | 1589 1590 |
| 47 55 | [chemical structure] | 1591 1592 |
| 47 57 | [chemical structure] | 1593 1594 |
| 47 59 | [chemical structure] | |
| | [chemical structure] | 1595 1596 |
| 47 60 | [chemical structure] | 1597 1598 |
| 48 49 | [chemical structure] | 1599 1600 |
| 48 51 | [chemical structure] | 1601 1602 |
| 48 53 | [chemical structure] | 1603 1604 |
| 48 55 | [chemical structure] | 1605 1606 |
| 48 57 | [chemical structure] | 1607 1608 |
| 48 59 | [chemical structure] | 1609 1610 |
| 48 60 | [chemical structure] | 1611 1612 |
| 49 51 | [chemical structure] | 1613 1614 |
| 49 53 | [chemical structure] | 1615 1616 |
| 49 55 | [chemical structure] | 1617 1618 |
| 49 57 | [chemical structure] | 1619 1620 |
| 49 59 | [chemical structure] | 1621 1622 |
| 49 60 | [chemical structure] | 1623 1624 |
| 50 51 | [chemical structure] | 1625 1626 |
| 50 53 | [chemical structure] | 1627 1628 |
| 50 55 | [chemical structure] | 1629 1630 |
| 50 57 | [chemical structure] | 1631 1632 |
| 50 59 | [chemical structure] | 1633 1634 |
| 50 60 | [chemical structure] | 1635 1636 |
| 51 52 | [chemical structure] | 1637 1638 |
| 51 58 | [chemical structure] | 1639 1640 |
| 52 53 | [chemical structure] | 1641 1642 |
| 52 55 | [chemical structure] | 1643 1644 |
| 52 57 | [chemical structure] | 1645 1646 |
| 52 59 | [chemical structure] | 1647 1648 |
| 52 60 | [chemical structure] | 1649 1650 |
| 53 58 | [chemical structure] | 1651 1652 |
| 54 55 | [chemical structure] | 1653 1654 |
| 54 57 | [chemical structure] | 1655 1656 |
| 54 59 | [chemical structure] | 1657 1658 |
| 54 60 | [chemical structure] | 1659 1660 |
| 55 56 | [chemical structure] | 1661 1662 |
| 56 57 | [chemical structure] | 1663 1664 |
| 56 59 | [chemical structure] | 1665 1666 |
| 58 59 | [chemical structure] | 1667 1668 |
| 58 60 | [chemical structure] | 1669 1670 |
| 56 60 | [chemical structure] | 1742 1743 |
| 10 18 | [chemical structure] | 1766 1767 |
| 10 18 | [chemical structure] | 1768 1769 |
| 10 30 | [chemical structure] | 1770 1771 |
| 10 30 | [chemical structure] | 1772 1773 |
| 45 55 | [chemical structure] | 1774 1775 |
| 45 55 | [chemical structure] | 1776 1777 |

TABLE 3
List of preferred base sequences of the
oligonucleotides according to the invention.
Oligonucieotides comprising these base
sequences are capable of binding to highly
similar regions (sequence stretches with
>50% identity) in two different DMD exons (
as exemplified in Table 2), and capable of
inducing the skipping of these two exons,
and any exons in between, to generate
an in-frame DMD transcript

| | | |
|---|---|---|
| Compound | Sequence* | SEQ ID NO |

First exon 8 - Second exon 19

| | | |
|---|---|---|
| PS830 | GUGAUGUACAUUAAGAUGGACUUC | 1671 |
| | GYGZYGYZXZYYZZGZYGGZXYYX | 1672 |
| | YGGZXYYXYYZYXYGGZY | 1722 |
| | YXYGZZXYYXYXZGXYY | 1723 |

First exon 9 - Second exon 22

| | |
|---|---|
| YXZGZGGYGGYGZXZYZZG | 1724 |
| YXZYZGYXGGYGZXZXYZZG | 1725 |

First exon 9 - Second exon 30

| | |
|---|---|
| YXYXZYZYXXXYGYGXYZGZXYG | 1726 |
| GZZYXGZGGXYYZGGYGZZGZZG | 1727 |
| YYXZGYXYXXYGGGXZGZXYG | 1728 |
| GZXYXXYGGZYYZZGYGYZZGG | 1729 |

First exon 10 - Second exon 13, 14, 15, 18, 20,
27, 30, 31, 32, 35, 42, 44, 47, 48, 55, 57, or 60

| | | |
|---|---|---|
| PS811 | CUUCCUUCCGAAAGAUUGCAAAUUC | 1673 |
| | XYYXXYYXXGZZZGZYYGXZZZYYX | 1674 |
| PS814 | GACUUGUCUUCAGGAGCUUCC | 1675 |
| | GZXYYGYXYYXZGGZGXYYXX | 1676 |
| PS815 | CAAAUGACUUGUCUUCAGGAGCUUC | 1677 |
| | XZZZYGZXYYGYXYYXZGGZGXYYX | 1678 |
| PS816 | CUGCCAAAUGACUUGUCUUCAGGAG | 1679 |
| | XYGXXZZZYGZXYYGYXYYXZGGZG | 1680 |
| PS1168 | CUGCCDDDUGDCUUGUCUUCDGGDG | 1681 |
| PS1050 | CCAAAUGACUUGUCU | 1682 |
| | CCAAAYGACYYGYCY | 1683 |
| PS1059 | CAAAUGACUUGUCUUCAGGAG | 1684 |
| PS1138 | CAAAUGACUUGUCUUCAGGAG | 1685 |
| PS1170 | CDDDUGDCUUGUCUUCDGGDG | 1686 |
| | ZYGZXYYGYXYYXZGGZGGZG | 1687 |
| PS1016 | CAGUCUCCUGGGCAGACUGGAUGCUC | 1688 |
| | XZGYXYXXYGGGXZGZXYGGZYGXYX | 1689 |
| | ZYGZZXYGXXZZZYGZXYYGYX | 1690 |
| | ZYZZGXYGXXZZXYGXYYGYX | 1691 |
| | GYXXZGGYYYZXYYXZXY | 1692 |
| | GYXXZXXYYGYXYGXZZY | 1693 |
| | XYYXYZZZGXYGYYYGZ | 1694 |
| | XYYXXYGZGGXZYYYGZ | 1695 |
| | YYYGZYZZXGGYXXZGGYYYZXYYXZ | 1696 |
| | ZGGXZYYYGZGXYGXGYXXZ | 1697 |

First exon 23 - Second exon 42

| | |
|---|---|
| YXYYXGZXZYXYXYYYXZXZGY | 1698 |
| GXGXYYYXYYXGZXZYXYX | 1699 |
| ZZYYYXZGZGGGXGXYYYXYYX | 1700 |
| YXYYXZGYXZYXZXXZYXZYXGY | 1701 |
| GGXZYGYXYYXZGYXZYXZX | 1702 |
| ZZYYYXXZZZGGXZYGYXYYX | 1703 |

First exon 45 - Second exon 51

| | |
|---|---|
| YGGXZYXYGYGYYYGZGGZYYGXYG | 1730 |
| YGGXZYYYXYZGYYYGGZGZYGGXZG | 1731 |

First exon 45 - Second exon 53

| | |
|---|---|
| YYXXZXZGYYGXZYYXZZYGYYXYGZ | 1732 |
| YYXZZXYGYYGXXYXXZGYYXYGZ | 1733 |
| YYXXYGYZGZZYZXYGGXZYXYGY | 1734 |
| YYXZZXYGYYGXXYXXGGYYXYGZ | 1735 |
| XYYYZZXZYYYXZYYXZZXYGYYGX | 1736 |
| YYXYYXXYYZGXYYXXZGXXZYYGYGYY | 1737 |

First exon 45 - Second exon 55

| | | |
|---|---|---|
| | UCCUGUAGAAUACUGGCAUCUGUUU | 1704 |
| | YXXYGYZGZZYZXYGGXZYXYGYYY | 1705 |
| PS1185 | UCCUGUDGDDUDCUGGCDUCUGUUU | 1706 |
| PS1186 | UCCUGUDGDDUDCUGGCDUCUGU | 1707 |
| | UCCUGUAGAAUACUGGCAUCUGU | 1708 |
| | YXXYGYZGZZYZXYGGXZYXYGY | 1709 |
| PS1187 | UCCUGUDGGDUDUUGGCDGUUGUUU | 1710 |
| | UCCUGUAGGAUAUUGGCAGUUGUUU | 1711 |
| | YXXYGYZGGZYZYYGGXZGYYGYYY | 1712 |
| PS1188 | UCCUGUDGGDUDUUGGCDGUUGU | 1713 |
| | UCCUGUAGGAUAUUGGCAGUUGU | 1714 |
| | YXXYGYZGGZYZYYGGXZGYYGY | 1715 |
| | UCCUGUAGGACAUUGGCAGUUGU | 1716 |
| | YXXYGYZGGZXZYYGGXZGYYGY | 1717 |
| | UCCUGUAGGACAUUGGCAGUUGUUU | 1718 |
| | YXXYGYZGGZXZYYGGXZGYYGYYY | 1719 |

First exon 45 - Second exon 60

| | |
|---|---|
| ZZYZXYGGXZYXYGYYGYYGZGG | 1738 |
| XYGYZGZZYZXYGGXZYXYGYY | 1739 |
| GXYYXXZYXYGGYGYYXZGG | 1740 |
| XYGXZGZZGXYYXXZYXYGGY | 1741 |

First exon 56 - Second exon 60

| | |
|---|---|
| YXYGYGYGZGXYYXZZYYYXZXXYYGGZG | 1720 |
| YCYYYXZGZGGXGXZZYYYXYXXYXGZZG | 1721 |

*D = 2,6-diaminopurine;
C = 5-methylcytosine;
X = C or 5-methylcytosine,
Y = U or 5-methyluracil;
Z = A or 2,6-diaminopurine

TABLE 6
List of most preferred and/or additional exon combinations, most preferred and/or additional exon
identity regions, and most preferred and/or additional oligonucleotides with their
base sequences, chemical modifications and sequence identification numbers,

| Exon | | | SEQ |
|---|---|---|---|
| Combi- | | | ID |
| nation | Exon Identity Region | Oligonucleotides | NO |
| 10-18 | 1)22/35 (62.9%) | PS816 and derivatives (exon 10 origin) | |
| | 10 AUUUGGAAGCUC-CUGAAGACAAGUCAU | PS816 CUGCCAAAUGACUUGUCUUCAGGAG | 1679 |
| | \|\|\|\|\|.\|\|.\|\|. \|.\|\|\|\|..\|.\|..\|. | XYGXXZZZYGZXYYGYXYYXZGGZG | 1680 |
| | 18 AUUUGCAAUCUUUCGGAAGGAAGGCAAC | PS1465 CUGCCDDAUGACUUGUCUUCAGGDG | 1812 |
| | UUGGCAG SEQ ID NO: 109 | PS1168 CUGCCDDDUGDCUUGUCUUCDGGDG | 1681 |
| | \|\|..\|\|\| | PS1169 CUGCCDDDUGDCUUGUCUUCDGGDG | 1813 |
| | UUCUCAG SEQ ID NO: 110 | PS1494 C*UGCCAAAUGACUUGUCUUCAGGAG | 1778 |
| | | PS1495 CUGCCAAAUGACUUGUCUUCAGGAG* | 1884 |
| | | PS1496 C*UGCCAAAUGACUUGUCUUCAGGAG* | 1885 |
| | | PS1497 C*UGCCAAAUGACU*UGUCUUCAGGAG* | 1886 |
| | | CUGC*CAAAUGACUUGUCUUCAGGAG | 1890 |
| | | C*U*G*C*C*A*A*AU*G*AC*U*UG*U*CUUCAGGAG | 1891 |
| | | PS813 and derivatives (exon 18 origin) | |
| | | PS813 GUCUGAGAAGUUGCCUUCCUUC | 1815 |
| | | PS1413 GUCUGDGDDGUUGCCUUCCUUC | 1816 |
| | | PS1414 GUCUGAGAAGUUGCCUUCCUUC | 1817 |
| | | PS1415 GUCUGAGAAGUUGCC UUCCUUC | 1818 |
| | | PS1135 GUCUGAGAAGUUGCCUUCCUUC | 1819 |
| | | Additional | |
| | | PS1498 C*UGCCAAAU*ACUUGUU*UUCAGGAG* | 1887 |
| | | CUGCCAAAUGACUUGUCUU*CAG*A*GA*G | 1888 |
| | | C*U*G*CCA*A*AU*GAC*UUGUCU*U*CAG*A*G A*G | 1889 |
| | | PS1125 CUGAGAAGUUGCCUUCCUUCAGAAAG | 1814 |
| | | PS1407 CUGAGAAGUUGCCUUCCUUC | 1820 |
| | | PS1408 CUGAGAAGUUGCCUUCCUUCCG | 1821 |
| | | PS1409 CUGAGAAGUUGCCUUCCUUCCGAA | 1822 |
| | | PS1410 UAAGUCUGAGAAGUUGCCUUCCUUC | 1823 |
| | | PS1411 CUGCCAAAUGACUUGUCUUC | 1824 |
| | | PS1412 AACUGCCAAAUGACUUGUCUUC | 1825 |
| | | PS1418 GUCUGDGDDGUUGCCUUCCUU | 1826 |
| | | PS1445 GDCUUGUCUUCDGGDGCUUCC | 1827 |
| | | (PS814, ID NO: 1675) | |
| | | PS1446 CDDDUGDCUUGUCUUCDGGDGCUUC | 1828 |
| | | (PS815, ID NO: 1677) | |
| | | PS1246 AUGAACUGCCAAAUGACUUGUC | 1780 |
| | | PS1457 ACUUGUCUUCAGGAGCUUCCAAAUG | 1781 |
| | | PS1459 ACUUGUCUUCAGGDGCUUCCDDDUG (PS1457 mod) | 1829 |
| | | PS1461 ACUUGUCUUCAGGAGCUUCCAAAUG (PS1457 mod) | 1830 |
| | | PS1462 ACUUGUCUUCAGGDGCUUCCDDDUG (PS1457 mod) | 1831 |
| | | PS1458 GUCUUCAGGAGCUUCCAAAUG | 1782 |
| | | PS1460 GUCUUCAGGDGCUUCCDDDUG (PS1458 mod) | 1832 |
| | 2)11/14 (78.6%) | PS1249 and derivatives | |
| | 10 CAGCUUUAGAAGAA SEQ ID NO: 1766 | PS1249 CUUCUAAAGCUGUUUGA | 1783 |
| | \|\|\|..\|\|\|.\|\|\|\|\| | XYYXYZZZGXYGYYYGZ | 1833 |
| | 18 CAGACUUAAAAGAA SEQ ID NO: 1767 | CUUCUAAAGCUGUUUGA | 1834 |
| | | CUUCUDDDGCUGUUUGD | 1835 |
| | 3) 13/19 (68.4%) | PS811 CUUCCUUCCGAAAGAUUGCAAAUUC | 1673, |
| | 10 AUUUCUAAUGAUGUGGAAG SEQ ID NO: 1768 | | 1674 |
| | \|\|\|\|..\|\|\|..\|..\|\|\|\|\| | | |
| | 18 AUUUGCAAUCUUUCGGAAG SEQ ID NO: 1769 | | |
| 10-30 | 1) 41/70 (58.6%) | PS1245 and derivatives (exon 30 origin) | |
| | 10 GACAAGUCAUUUGGCAGUUCAUUGAUGGAGAGUG// | PS1245 AUAAGCUGCCAACUGCUUGUC | 1784 |
| | \|\|\|\|\|\| \|\|.\|\|\|\|\|\|\|.\|.\|\| \|.\|\| | ZYZZGXYGXXZZXYGXYYGYX | 1836 |
| | 30 GACAAG-CAGUUGGCAGCUUAU--------AUUG// | | |
| | //AAGUAAACCUGGACCGUUAUCAAACAGCUUUAGAAG | PS1358 and derivatives (exon 30 origin) | |
| | .\|\|..\|\|..\|\|\|\|\|.....\|\|\|\|\|...\|\|...\|\|\|\| | | |
| | //CAGACAAGGUGGACGCAGCUCAAAUGCCUCAGGAAG | PS1358 CUGGGCUUCCUGAGGCAUUUGAGCU | 1786 |
| | SEQ ID NO: 127 | XYGGGXYYXXYGZGGXZYYYGZGXY | 1838 |
| | SEQ ID NO: 128 | PS816 and derivatives (exon 10 origin) | 1679- |
| | | | 1681, |
| | | | 1812- |
| | | | 1814 |
| | | Additional | |
| | | PS814 | 1675, |
| | | | 1676 |
| | | PS815 | 1677, |
| | | | 1678 |
| | | PS1246 AUGAACUGCCAAAUGACUUGUC | 1780 |
| | | PS1359 AUUUGAGCUGCGUCCACCUUGUCUG | 1785 |
| | | ZYYYGZGXYGXGYXXZXXYYGYXYG | 1837 |
| | 2) 22/35 (62.9%) | PS1016 and derivatives (axon 30 origin) | |
| | 10 GGAGAGUGAAGUAAACCUGGACCGUUAUCAAACAG | PS1016 CAGUCUCCUGGGCAGACUGGAUGCUC | 1688 |
| | \|\|\|\|\|.\|\|\|\|. \|\|.\|\|\|....\|.\|.\|\|\|.\|..\|\| | XZGYXYXXYGGGXZGZXYGGZYGXYX | 1689 |
| | 30 GGAGACUGAAA-AAUCCUUACACUUAAUCCAGGAG | PS1451 CDGUCUCCUGGGCDGDCUGGDUGCUC | 1839 |
| | SEQ ID NO: 1772 | PS1452 CAGUCUCCUGGGCDGDCUGGAUGCUC | 1840 |
| | | PS1453 CDGUCUCCUGGGCAGACUGGDUGCUC | 1841 |
| | SEQ ID NO: 1773 | PS1448 CAGUCUCCUGGGCAGACUGGAUGCUC | 1842 |
| | | PS1449 CDGUCUCCUGGGCDGDCUGGDUGCUC | 1843 |
| | | PS1450 <CAGUCUCCUGGGCAGACUGGAUGCUC> | 1844 |
| | | Additional | |
| | | PS1454 GUCUCCUGGGCAGACUGGAUGCUC | 1845 |
| | | GYXYXXYGGGXZGZXYGGZYGXYX | 1846 |
| | | PS1455 CAGUCUCCUGGGCAGACUGGAUGC | 1847 |
| | | XZGYXYXXYGGGXZGZXYGGZYGX | 1848 |
| | | PS1456 GUCUCCUGGGCAGACUGGAUGC | 1849 |
| | | GYXYXXYGGGXZGZXYGGZYGX | 1850 |
| | | PS1357 GACUCCUGGAUUAAGUGUAAGGAUUU | 1787 |
| | | GZCYCCYGGZYYZZGYGYZZGGZYYY | 1851 |
| 45-55 | 1) 20/25 (80.0%) | PS535 and derivatives (exon 55 origin) | |
| | 45 AAACAGAUGCCAGUAUUCUACAGGA | PS535 CAUCCUGUAGGACAUUGGCAGUUG | 1788 |
| | \|\|\|\|\|..\|\|\|\|\|.\|.\|.\|\|\|\|\|\|\|\| | XZYXXYGYZGGZXZYYGGXZGYYG | 1852 |
| | 55 AAACAACUGCCAAUGUCCUACAGGA | | |
| | SEQ ID NO: 1571 | Additional | |
| | | PS537 CUGUAGGACAUUGGCAGUUGUUUC | 1789 |
| | SEQ ID NO: 1572 | XYGYZGGZXZYYGGXZGYYGYYYX | 1853 |
| | | PS1185 | 1706 |
| | | PS1186 | 1707 |
| | | PS1187 | 1710 |
| | | PS1188 | 1713 |
| | 2) 13/18 (72.2%) | PS479 and derivatives | |
| | 45 AUGCAACUGGGGAAGAAA SEQ ID NO: 1774 | PS479 CUGAAUUAUUUCUUCCCCAGUUGCA | 1790 |
| | \|.\|\|..\|\|..\|\|\|\|\|\|\|\| | XYGZZYYZYYYXYYXXXXZGYYGXZ | 1854 |
| | 55 AGGCUGCUUUGGAAGAAA SEQ ID NO: 1775 | | |
| | | Additional | |
| | | PS481 UUAUUUCUUCCCCAGUUGCAUUCAA | 1792 |
| | | YYZYYYXYYXXXXZGYYGXZYYXZZ | 1855 |

ADDITIONAL EXON COMBINATIONS

| | | | |
|---|---|---|---|
| | (SEQ ID NO; see Table 2) | | |
| 11-23 | 191-192 | UCAGUUUCUUCAUCUUCUGAU | 1794 |
| | | YXZGYYYXYYXZYXYYXYGZY | 1861 |
| | | UCAAUUUCUUCAAAUUCUGAU | 1795 |
| | | YXZZYYYXYYXZZZYYXYGZY | 1862 |
| | | CUUCAGUUUCUUCAUCUUCUGAU | 1796 |
| | | XYYXZGYYYXYYXZYXYYXYGZY | 1863 |
| | | CCUCAAUUUCUUCAAAUUCUGAU | 1797 |
| | | XXYXZZYYYXYYXZZZYYXYGZY | 1864 |
| | | UACUUCAGUUUCUUCAUCUUCUGAU | 1798 |
| | | YZXYYXZGYYYXYYXZYXYYXYGZY | 1865 |
| | | UCCCUCAAUUUCUUCAAAUUCUGAU | 1799 |
| | | YXXXYXZZYYYXYYXZZZYYXYGZY | 1866 |
| 13-30 | 285-286 | CUACCACCACCAUGUGAGUGA | 1808 |
| | | XYZXXZXXZXXZYGYGZGYGZ | 1867 |
| | | CUGCCAACUGCUUGUCAAUGA | 1809 |
| | | XYGXXZZXYGXYYGYXZZYGZ | 1868 |
| | | AGUUGCGUGAUCUCCACUAGA | 1810 |
| | | ZGYYGXGYGZYXYXXZXYZGZ | 1869 |
| | | AGCUGCGUCCACCUUGUCUGCA | 1811 |
| | | ZGXYGXGYXXZXXYYGYXYGXZ | 1870 |
| | | UGAGAGAAUUGACCCUGACUUGU | 1856 |
| | | YGZGZGZZYYGZXXXYGZXYYGY | 1871 |
| | | ACCAUGUGAGUGAGAGAAUUGACCCU | 1857 |
| | | ZXXZYGYGZGYGZGZGZZYYGZXXXY | 1872 |
| | | CACCACCAUGUGAGUGAGAGA | 1858 |
| | | XZXXZXXZYGYGZGYGZGZGZ | 1873 |
| | | CUCCACUAGAUUCAUCAACUAC | 1859 |
| | | XYXXZXYZGZYYXZYXZZXYZX | 1874 |
| | | UCUUCCAAAGCAGCAGUUGCGUG | 1860 |
| | | YXYYXXZZZGXZGXZGYYGXGYG | 1875 |
| 34-53 | 1294-1295 | UCUUAGCUGCCAGCCAUU | 1800 |
| | | YXYGYZGXYGXXZGXXZYY | 1876 |
| | | UCCUUAGCUUCCAGCCAUU | 1801 |
| | | YXXYYZGXYYXXZGXXZYY | 1877 |
| | | UCUUAGCUGCCAGCCAUUCUGU | 1802 |
| | | YXYGYZGXYGXXZGXXZYYXYGY | 1878 |
| | | UCCUUAGCUUCCAGCCAUUGUGU | 1803 |
| | | YXXYYZGXYYXXZGXXZYYGYGY | 1879 |
| 40-53 | 1477-1478 | UCUUGUACUGAUACCACUGAU | 1804 |
| | | YXYYGYZXYGZYZXXZXYGZY | 1880 |
| | | UCUUGUACUUCAUCCCACUGAU | 1805 |
| | | YXYYGYZXYYXZYXXZXYGZY | 1881 |
| 44-56 | 1557-1558 | UCUCAGGAAUUUGUGUCUUU | 1806 |
| | | YXYXZGGZZYYYGYGYXYYY | 1882 |
| | | UCUCAGGAUUUUUUGGCUGU | 1807 |
| | | YXYXZGGZYYYYYYGGXYGY | 1883 |

wherein * = LNA,
C = 5-methylcytosine,
U = 5-methyluracil,
D = 2,6-diaminopurine,
X = C or 5-methylcytosine,
Y = U or 5-methyluracil,
Z = A or 2,6-diaminopurine, and
< > all 2'-fluoro nucleotides (as in SEQ ID NO: 1844).

### Examples 1-5

### Materials and Methods

[0345] The design of the oligonucleotides was primarily based on reverse complementarity to specific, highly similar, sequence stretches in two different DMD exons, as identified by EMBOSS Matcher and as disclosed in Table 2. Further sequence parameters taken into account were the presence of partly open/closed secondary RNA structures in said sequence stretches (as predicted by RNA structure version 4.5 or RNA mfold version 3.5 (Zuker, M.) and/or the presence of putative SR-protein binding sites in said sequence stretches (as predicted by the ESE-finder software (Cartegni L, et al. 2002 and Cartegni L, et al. 2003). All AONs were synthesized by Prosensa Therapeutics B.V. (Leiden, Netherlands) or obtained from commercial source (ChemGenes, US), and contain 2′-O-methyl RNA and full-length phosphorothioate (PS) backbones. All oligonucleotides were 2′-O-methyl phosphorothioate RNA, and synthesized in 10 μmol scale using an OP-10 synthesizer (GE/ÄKTA Oligopilot), through standard phosphoramidite protocols. Oligonucleotides were cleaved and deprotected in a two-step sequence (DIEA followed by conc. NH₄OH treatment), purified by HPLC and dissolved in water and an excess of NaCl was added to exchange ions. After evaporation, compounds were redissolved in water, desalted by FPLC and lyophilized. Mass spectrometry confirmed the identity of all compounds, and purity (determined by UPLC) was found acceptable for all compounds (>80%). For the in vitro experiments described herein, 50 μM working solutions of the AONs were prepared in phosphate buffer (pH 7.0).

### Tissue Culturing, Transfection and RT-PCR Analysis

[0346] Differentiated human healthy control muscle cells (myotubes) were transfected in 6-wells plates at a standard AON concentration of 400 nM, according to non-GLP standard operating procedures. For transfection polyethylenimine (ExGen500; Fermentas Netherlands) was used (2 μl per μg AON, in 0.15M NaCl). Aforementioned transfection procedures were adapted from previously reported material and methods (Aartsma-Rus A., et al., 2003). At 24 hrs after transfection, RNA was isolated and analyzed by RT-PCR. Briefly, to generate cDNA, a random hexamer mixture (1.6 μg/μl; Roche Netherlands) was used in the reverse transcriptase (RT) reaction on 500-1000 ng input RNA. The PCR analysis was subsequently done on 3 μl of cDNA for each sample, and included a first and nested PCR using DMD gene specific primers (see Tables 4 and 5). The RNA isolation and RT-PCR analysis were performed according to non-GLP standard operating procedures adapted from previously reported material and methods (Aartsma-Rus A., et al., 2002; and Aartsma-Rus A., et al. 2003). RT-PCR products were analyzed by gel electrophoresis (2% agarose gels). The resulting RT-PCR fragments were quantified through DNA Lab-on-a-Chip analysis (Agilent Technologies USA; DNA 7500 LabChips). The data was processed by “Agilent 2100 Bioanalyzer” software and Excel 2007. The ratio of the smaller transcript products (containing the anticipated multiple exon skipping) to the total amount of transcript products was assessed (representing the skipping efficiencies in percentages), and directly compared to that in non-transfected cells. PCR fragments were also isolated from agarose gels (QiAquick gel extraction kit, Qiagen Netherlands) for sequence verification (Sanger sequencing, BaseClear, Netherlands).

TABLE 4
PCR primer sets used for detection of the skipping of the targeted exons

| | | |
|---|---|---|
| Target | 1st PCR | 2nd PCR |

| Exons | forw | rev | forw | rev |
|---|---|---|---|---|
| 10 to 18 | h7f | h20r | h8f | h19r |
| 10 to 30 | h7f | h32r | h8f | h31r |
| 10 to 47 | h8f | h50r | h9f | h49r |
| 10 to 57 | h8f | h64r | h9f | h63r2 |
| 45 to 55 | h43f2 | h57r | h44f | h56r |

TABLE 5
Primer sequences

| Primer ID | Sequence (5′-->3′) |
|---|---|
| h7f | agtcagccacacaacgactg |
| h8f | caaggccacctaaagtgactaaa |
| H9f | gagctatgcctacacacagg |
| h43f2 | cctgtggaaagggtgaagc |
| h44f | gcgatttgacagatctgttg |
| h19r | gcatcttgcagttttctgaac |
| h20r | actggcagaattcgatccac |
| h31r | tgtgcaacatcaatctgagac |
| h32r | tagacgctgctcaaaattgg |
| h49r | cactggctgagtggctgg |
| h50r | tcagtccaggagctaggtc |
| h56r | cgtctttgtaacaggactgc |
| h57r | tctgaactgctggaaagtcg |
| h63r2 | gagactctgtcattttgggatg |
| h64r | gggccttctgcagtcttcgga |

(SEQ ID NO: 1745 - 1759)

### Results

### Example 1

### Targeting the Sequence Stretch with High Similarity in Exon 10 and 18 with AONs at Different Sites

[0347] Based on a highly similar (63%) sequence stretch in exons 10 (SEQ ID NO:109) and 18 (SEQ ID NO:110) a series of AONs were designed dispersed over said sequence stretch, either 100% reverse complementary to exon 10 (PS814; SEQ ID NO:1675, PS815; SEQ ID NO:1677, PS816; SEQ ID NO:1679) or to exon 18 (PS811; SEQ ID NO:1673). Following transfection in healthy human control myotube cultures, RT-PCR analysis demonstrated that all four AONs were capable of inducing the skipping of exon 10 to 18 (confirmed by sequence analysis) (FIG. 1). PS811 and PS816 have highest reverse complementarity percentages with both exons (FIG. 1B) and were most efficient with exon 10 to 18 skipping efficiencies of 70% and 66% respectively (FIG. 1C). PS814 was least efficient, which may have been inherent to its location and/or shorter length (21 versus 25 nucleotides) and thus lower binding affinity or stability. No exon 10 to 18 skipping was observed in non-treated cells (NT). These results were highly reproducible (exon 10 to 18 skipping by PS816 in 20/20 different transfections) and demonstrate that the skipping of a multi-exon stretch from exon 10 to 18 is feasible by using a single AON that is capable of binding to both exons 10 and 18, in a region with high sequence similarity (63%), and that is capable of inducing the skipping of these exons and all exons in between. Although additional multiple exon skipping fragments may be obtained in this transcript region, the resulting transcript in which exon 9 was directly spliced to 19 (an in frame transcript) was most abundant in all experiments.

### Example 2

### Targeting the Sequence Stretch with High Similarity in Exon 10 and 18 with AONs of Different Lengths

[0348] Within the highly similar sequence stretch in exons 10 (SEQ ID NO:109) and IS (SEQ ID NO:110) we evaluated the effect of AONs with different lengths to identify the most effective minimal length. Following transfection of PS816 (a 25-mer; SEQ ID NO:1679), PS1059 (a 21-mer; SEQ ID NO:1684), or PS1050 (a 15-mer; SEQ ID NO:1682) in healthy human control muscle cells (i.e. differentiated myotubes), RT-PCR analysis demonstrated that all three AONs were capable of inducing the skipping of exon 10 to 18 (confirmed by sequence analysis) (FIG. 2A, B). PS816 and PS1059 were most efficient (68% and 79% respectively). The shorter PS1050 was less effective (25%). No exon 10 to 18 skipping was observed in non-treated cells (NT). These results indicate that the skipping of a multi-exon stretch from exon 10 to 18 is feasible by using AONs of 15, 21 and 25 nucleotides. Longer AONs are anticipated to work as well. The 21-mer PS1059 was the most effective, shortest candidate. The 15-mer PS1050 was least efficient which may have been inherent to its reduced reverse complementarily to exon 18 (47%; FIG. 2B) and/or reduced binding affinity or stability to the target RNA. Base modifications may be required to enhance the Tm, and thus binding affinity or duplex stability, of 15-mess in order to improve their bioactivity. The most abundant resulting transcript product in this experiment was again that in which exon 9 was directly spliced to 19 (an in frame transcript).

### Example 3

### Targeting the Sequence Stretch with High Similarity in Exon 10 and 18 with AONs with Modified Base Chemistry

[0349] The particular characteristics of a chosen AON chemistry at least in part affects the delivery of an AON to the target transcript: administration route, biostability, biodistribution, intra-tissue distribution, and cellular uptake and trafficking. In addition, further optimization of oligonucleotide chemistry is conceived to enhance binding affinity and stability, enhance activity, improve safety, and/or to reduce cost of goods by reducing length or improving synthesis and/or purification procedures. Within the highly similar sequence stretch in exons 10 (SEQ TD NO:109) and 18 (SEQ TD NO:110) we here evaluated the effect of 2′-O-methyl RNA AONs with different modified bases (such as 5-substituted pyrimidines and 2,6-diaminopurines). Following transfection of PS816 (a regular 2′-O-methyl RNA AON; SEQ ID NO:1679), PS1168 (PS816 but with all As replaced by 2,6-diaminopurines; SEQ ID NO:1681), PS1059 (a regular 2′-O-methyl phosphorothioate RNA AON; SEQ ID NO:1684), PS138 (PS1059 but with all Cs replaced by 5-methylcytosines; SEQ ID NO:1685), or PS1170 (PS1059 but with all As replaced by 2,6-diaminopurines; SEQ ID NO:1686) (FIG. 3B) in healthy human control muscle cells (i.e. differentiated myotubes), RT-PCR analysis demonstrated that all five AONs were capable of inducing the skipping of exon 10 to 18 (confirmed by sequence analysis) (FIG. 3). PS816 was most efficient (88%). Although the base modifications in these particular sequences did not further improve bioactivity, they may have a more positive effect on biodistribution, stability, and/or safety such that less efficient compounds are still favored for clinical development. These results indicate that the skipping of a multi-exon stretch from exon 10 to 18 is feasible by using AONs with modified bases. The most abundant resulting transcript product in this experiment was again that in which exon 9 was directly spliced to 19 (an in frame transcript).

### Example 4

### PS816 Induces the Skipping of Other In-Frame Multi-Exon Stretches

[0350] The highly similar sequence stretch in exons 10 (SEQ ID NO:109) and 18 (SEQ ID NO:110) is also (partly) present in exons 30 (SEQ ID NO:128), 31 (SEQ ID NO:130), 32 (SEQ ID NO:132); 42 (SEQ ID NO:152), 47 (SEQ ID NO:158), 48 (SEQ ID NO:160), 57(SEQ ID NO:170), and 60 (SEQ ID NO:174) B, Table 2), We here thus focused on the detection of different multi-exon stretch skipping following transfection of 400 nM PS816 (SEQ ID NO:1679). We used different primer sets (Table 4 and 5) for that purpose. Indeed with RT-PCR analysis we observed the in-frame exon 10 to 30, exon 10 to 42, exon 10 to 47, exon 10 to 57, and/or exon 10 to 60 skipping in multiple experiments (confirmed by sequence analysis), which was not observed in non-treated cells. As an example FIG. 4C shows the PS816-induced exon 10 to 18, exon 10 to 30, and exon 10 to 47 skipping. Despite additional multiple exon skipping events (either in-frame or out-of-frame), the resulting transcript in which exon 9 was directly spliced to 19 (an in frame transcript) was most reproducible and seemed most abundant in all experiments. These results confirm that multiple exon skipping can be induced across the DMD gene using a single AON that is capable of binding to a sequence stretch that is highly similar between two different exons and capable of inducing the skipping of these exons and all exons in between to generate an in-frame DMD transcript.

### Example 5

### Targeting a Sequence Stretch with High Similarity in Exon 45 and 55 with AONs with Modified Base Chemistry

[0351] Based on a highly similar (80%) sequence stretch in exons 45 (SEQ ID NO:1571) and 55 (SEQ ID NO:1572) a series of AON's were designed dispersed over said sequence stretch, either 100% reverse complementary to exon 45 (PS1185; SEQ ID NO:1706, PS1186; SEQ ID NO:1707) or 96% to exon 55 (with one mismatch) (PS1188; SEQ NO:1713) (FIG. 5A). In all three AONs the As were replaced by 2,6-diaminopurines. Following transfection in healthy human control myotube cultures, RT-PCR analysis demonstrated that PS1185, PS1186, and PS1188 were capable of inducing the skipping of exon 45 to 55 (confirmed by sequence analysis) (FIG. 5B), exon 45 to 55 skipping was observed in non-treated cells (NT). These results demonstrate that the skipping of another multi-exon stretch, from exon 45 to 55, is feasible by using a single AON that is capable of binding to both exons 45 and 55, in a region with high sequence similarity (80%), and that is capable of inducing the skipping of these exons and all exons in between. The resulting transcript in which exon 44 was directly spliced to 56 is in-frame was and was observed in multiple experiments. As for the exon 10 to 18 skipping experiments (example 3) we here show again that AONs with modified bases can be applied effectively. Furthermore, the results obtained with PS1188 indicate that AONs do not need to be 100% reverse complementary to one of the target exons, but can also be designed as hybrid structures, in which there is no 100% reverse complementarity to either target exon.

### REFERENCE LIST

[0352] Aartsma-Rus A, Bremmer-Bout M, Janson A A, den Dunnen J T, van Ommen G J, van Deutekom J C, Targeted exon skipping as a potential gene correction therapy for Duchenne muscular dystrophy. See 1 article found using an alternative search: NeuromuscUl Disord. 2002; 12:S71-7.
[0353] Aartsma-Rus A, Janson A A, Kaman W E, Bremmer-Bout M, den Dunnen J T, Baas F, van Ommen G J, van Deutekom J C. Therapeutic antisense-induced exon skipping in cultured muscle cells from six different DMD patients. Hum Mol Genet. 2003; 2(8):907-14.
[0354] Aartsma-Rus A, Janson A A, Kaman W E, Bremmer-Bout M, van Ommen G J, den Dunnen J T, van Deutekom J C. Antisense-induced multiexon skipping for Duchenne muscular dystrophy makes more sense. Am. J. Hum. Genet. 2004; January 74(1):83-92.
[0355] Alloza I et al., Genes Immun 2012; 13(3):253-257
[0356] Abeliovich A et al., J Neurochem 2006; 99:1062-1072
[0357] van Ommen G J, van Deutekom J, Aartsma-Rus A. The therapeutic potential of antisense-mediated exon skipping. Curr Opin Mol Ther. 2008; 10(2):140-9.
[0358] Andrade M A, Perez-Iratxeta C, Ponting C P. Protein repeats: structures, functions, and evolution. J Struct Biol. 2001; 134(2-3):117-31.
[0359] Arai K. Uchiyama N, Wada T. Synthesis and properties of novel 2″-O-alkoxymethyl-modified nucleic acids. Bioorg Med Chem Lett. 2011; 21(21):6285-7.
[0360] Béroud C, Tuffery-Giraud S. Matsuo M, Hamroun D, Humbertclaude V. Monnier N, Moizard M P, Voelckel M A, Calemard E M, Boisseau P, Blayau M, Philippe C, Cossée M, Pages M, Rivier F, Danos O, Garcia L. Claustres M. Multiexon skipping leading to an artificial DMD protein lacking amino acids from exons 45 through 55 could rescue up to 63% of patients with Duchenne muscular dystrophy. Hum Mutat. 2007; February; 28(2):196-202.
[0361] Bomont P et al., Nat Genet 2000; 26(3):370-374
[0362] Cartegni L, Chew S E, Krainer A R. Listening to silence and understanding nonsense: exonic mutations that affect splicing. Nat Rev Genet 2002; 3(4):285-98.
[0363] Cartegni L, Wang J. Zhu Z, Zhang M Q, Krainer A R. ESEfinder: A web resource to identify exonic splicing enhancers. Nucleic Acids Res 2003; 31(13):3568-71.
[0364] Chabriat H et al., Lancet Neurol 2009; 8(7):643-653
[0365] Cheng A J and Van Dyke M W. Oligodeoxyribonucleotide length and sequence effects on intramolecular and intermolecular G-quartet formation. Gene. 1997; 197(1-2):253-60.
[0366] Cirak S, Arechavala-Gomeza V, Guglieri M, Feng L, Torelli S, Anthony K, Abbs S, Garralda M E, Bourke J, Wells D J, Dickson G, Wood M J, Wilton S D, Straub V, Kole R, Shrewsbury S B, Sewry C, Morgan J E, Bushby K, Muntoni F. Exon skipping and dystrophin restoration in patients with Duchenne muscular dystrophy after systemic phosphorodiamidate morpholino oligomer treatment: an open-label, phase 2, dose-escalation study. Lancet. 2011; 378(9791): 595-605.
[0367] Cirak S et al., Brain 2010; 133(Pt 7):2123-2135
[0368] Diebold S S, Massacrier C, Akira S, Paturel C, Morel Y, Reis e Sousa C. Nucleic acid agonists for Toll-like receptor 7 are defined by the presence of uridine ribonucleotides. Eur J Immunol; 2006; 36(12): 3256-67.
[0369] Dhanoa B S et al., Hum Genomics 2013; 7(1):13
[0370] Dorn A, Kippenberger S. Clinical application of CpG-, non-CpG-, and antisense oligodeoxynucleotides as immunomodulators. Curr Opin Mol Ther. 2008; 10(1):10-20.
[0371] Dubosq-Bidot L et al., Eur Heart J 2009; 30(17):2128-2136
[0372] Ehmsen J. et al. J. Cell Sci. 2002, 115 (Pt14): 2801-2803.
[0373] Fiorillo C et al., Neurogenetics 2012; 13(3):195-203
[0374] Friedman J S et al., Am J Hum genet 2009; 84(6):792-800
[0375] Goemans N M, Tulinius M, van den Akker J T, Burm B E, Ekhart P F, Heuvelmans N, Holling T, Janson A A, Platenburg G J, Sipkens J A, Sitsen J M, Aartsma-Rus A, van Ommen G J, Buyse G, Darin N, Verschuuren J J, Campion G V, de Kimpe S J, van Deutekom S C. Systemic administration of PRO051 in Duchenne's muscular dystrophy. N Engl J Med. 2011; 364(16):1513-22.
[0376] Goyenvaile A, Wright J, Babbs A, Wilkins V, Garcia L, Davies K E. Engineering Multiple U7snRNA Constructs to Induce Single and Multiexon-skipping for Duchenne Muscular Dystrophy. Mol Ther. 2012 June; 20(6):1212-21.
[0377] Heemskerk H, de Winter C, van Kuik P, Heuvelmans N, Sabatelli P, Rimessi P, Braghetta P, van Ommen G J, de Kimpe S, Ferlini A, Aartsma-Rus A, van Deutekom J C. Preclinical P K and P D studies on 2′-O-methyl-phosphorothioate RNA antisense oligonucleotides in the mdx mouse model. Mol Ther. 2010; 18(6):1210-7.
[0378] Heneka M T et al., Nature 2013; 493(7434):674-678
[0379] Hodgetts S, Radley H, Davies M, Grounds M D. Reduced necrosis of dystrophic muscle by depletion of host neutrophils, or blocking TNFalpha function with Etanercept in mdx mice. Neuromuscul Disord. 2006; 16(9-10):591-602.
[0380] Hovnanian A, Cell Tissue Res 2013; 351(2):289-300
[0381] Huang J Y et al., Hum Reprod 2013; 28(4):1127-1134
[0382] Knauf F et al., Kidney Int 2013; doi:10.1038/ki.2013.207
[0383] Krieg A M, Yi A K, Matson S, Waldschmidt T J, Bishop G A, Teasdale R, Koretzky G A, Klinman D M. CpG motifs in bacterial DNA trigger direct B-cell activation. Nature. 1995; 374(6522):546-9.
[0384] Krieg, A M. The role of CpG motifs in innate immunity. Curr. Opin. Immunol. 2000; 12: 35-43.
[0385] Kumar L, Pharm. Technol. 2008, 3, 128.
[0386] Louis-Dit-Picard H et al., Nat Genet 2012; 44(4):456-460
[0387] Macaya R F, Waldron J A, Beutel B A, Gao Joesten N E, Yang M, Patel R, Bertelsen A H, Cook A F. Structural and functional characterization of potent antithrombotic oligonucleotides possessing both quadruplex and duplex motifs. Biochemistry. 1995; 34(13):4478-92.
[0388] Manzur A Y, Kuntzer T, Pike M, Swan A. Glucocorticoid corticosteroids for Duchenne muscular dystrophy. Cochrane Database Syst Rev. 2008; (1):CD003725.
[0389] Monaco A. P., et al., Genomics 1988; 2: 90-95.
[0390] Peacock H, Fucini R V, Jayalath P, Ibarra-Soza J M, Haringsma H J, Flanagan W M, Willingham A, Beal P A. Nucleobase and ribose modifications control immunostimulation by a microRNA-122-mimetic RNA. J. Am. Chem. Soc. 2011, 133(24): 9200-3.
[0391] Mollie A et al., Hum Genet 2011; 129(6):641-654
[0392] Moller R S et al., Epilepsia 2013; 54(2):256-264

[0393] Noris P et al., Blood 2011; 117(24):6673-6680
[0394] Popovic P J, DeMarco R, Lotze M T, Winikoff S E, Bartlett D L, Krieg A M, Guo Z S, Brown C K, Tracey K J, Zeh H J 3rd. High mobility group B1 protein suppresses the human plasmacytoid dendritic cell response to TLR9 agonists. J of Immunol 2006; 177: 8701-8707.
[0395] Puente X S et al., Nature 2011; 475(7354):101-105
[0396] Raciti G A et al., Diabetologia 2011; 54(11):2911-2922
[0397] Rantamaki T et al., Am J Hum Genet 1999; 64(4):993-1001
[0398] Remington: The Science and Practice of Pharmacy, 20th Edition. Baltimore, Md.: Lippincott Williams & Wilkins, 2000
[0399] Sirmaci A et al., Am J Hum Genet 2011; 89(2):289-294
[0400] Stuart H M, et al., Am Hum Genet 2013; 92(2):259-264
[0401] Suzuki K, Doi T, Imanishi T, Kodama T, Tanaka T. Oligonucleotide aggregates bind to the macrophage scavenger receptor. Eur J Biochem. 1999; 260(3):855-60.
[0402] Uchida K et al., Immunology 2005; 116(1):53-63
[0403] van Deutekom J C, Janson A A, Ginjaar I B, Frankhuizen W S, Aartsma-Rus A, Bremmer-Bout M, den Dunnen J T, Koop K, van der Kooi A J, Goemans N M, de Kimpe S J, Ekhart P F, Venneker E H, Platenburg G J, Verschuuren J J, van Ommen G J. Local dystrophin restoration with antisense oligonucleotide PRO051. N Engl J Med. 2007; 357(26):2677-86.
[0404] van Vliet L, de Winter C L, van Deutekom J C, van Ommen G J, Aartsma-Rus A. Assessment of the feasibility of exon 45-55 multiexon skipping for Duchenne muscular dystrophy. BMC Med Genet. 2008, December 1; 9:105.
[0405] Wagner, H., Bacterial CpG DNA activates immune cells to signal infectious danger Adv. Immunol. 1999; 73: 329-368.
[0406] Yokota T, Duddy W, Partridge T. Optimizing exon skipping therapies for DMD. Acta Myol. 2007; 26(3):179-84.
[0407] Yokota T, Hoffman E, Takeda S. Antisense oligo-mediated multiple exon skipping in a dog model of duchenne muscular dystrophy. Methods Mol Biol. 2011; 709:299-312.
[0408] Zuker M. Mfold web server for nucleic acid folding and hybridization prediction. Nucleic Acids Res. 2003; 31 (13), 3406-3415.

1. A method for designing an oligonucleotide for producing an at least partially functional protein, wherein said method comprises the following steps:
(a) identifying an in-frame combination of a first and a second exon in a same pre-mRNA, wherein a region of said second exon has at least 50% identity with a region of said first exon;
(b) designing an oligonucleotide that is functional to bind to said region of said first exon and said region of said second exon, and
(c) wherein said binding results in the skipping of said first and said second exon.

2. A method according to claim 1, wherein the oligonucleotide is functional to bind to a portion of a region within a first exon and a portion of a region within a second region.

3. A method according to claim 1, wherein the binding of said oligonucleotide is functional to interfere with at least one splicing regulatory sequence in said regions of said first and second exons and/or with the secondary structure encompassing at least said first and/or said second exon in said pre-mRNA.

4. A method according to claim 3, wherein said splicing regulatory sequence comprises an exonic splicing enhancer (ESE), an exon recognition sequence (ERS) and/or a binding site for a serine-arginine (SR) protein.

5. A method according to claim to claim 1, wherein said oligonucleotide is not functional to bind to non-exon sequences.

6. A method according to claim to claim 1, wherein at least a third exon is present between said first and second exons and wherein the oligonucleotide is functional to induce skipping of said first and said at least a third exon.

7. A method according to claim 6, wherein at least a third and a fourth exon are present between said first and second exons, and wherein said oligonucleotide is functional to skip said first and said at least a third and a fourth exon.

8. A method according to claim 1, wherein said oligonucleotide comprises 10 to 40 nucleotides.

9. A method according to any one of claim 1, wherein said oligonucleotide comprises at least one modification compared to a naturally occurring ribonucleotide- or deoxyribonucleotide-based oligonucleotide, more preferably
(a) at least one base modification, preferably selected from 2-thiouracil, 2-thiothymine, 5-methylcytosine, 5-methyluracil, thymine, 2,6-diaminopurine, more preferably selected from 5-methylpyrimidine and 2,6-diaminopurine; and/or
(b) at least one sugar modification, preferably selected from 2′-O-methyl, 2′-O-(2-methoxyl)ethyl, 2′-O-deoxy (DNA), 2′-F, morpholino, a bridged nucleotide or BNA, or the oligonucleotide comprises both bridged nucleotides and 2′-deoxy modified nucleotides (BNA/DNA mixmers), more preferably the sugar modification is 2′-O-methyl; and/or
(c) at least one backbone modification, preferably selected from phosphorothioate or phosphorodiamidate, more preferably the backbone modification is phosphorothioate.

10. A method according to claim 1, wherein said oligonucleotide comprises one or more conjugate groups, optionally protected, selected from the group consisting of peptides, proteins, carbohydrates, drugs, targeting moieties, uptake enhancing moieties, solubility enhancing moieties, pharmacodynamics enhancing moieties, pharmacokinetics enhancing moieties, polymers, ethylene glycol derivatives, vitamins, lipids, polyfluoroalkyl moieties, steroids, cholesterol, fluorescent moieties, reporter molecules, radioactively labeled moieties and combinations thereof, attached directly or via a divalent or multivalent linker, to a terminal or internal residue.

11. A method according to claim 1, wherein said first and second exon are selected from exons 10, 18, 30, 8, 9, 11, 13, 19, 22, 23, 34, 40, 42, 44, 45, 47, 51, 53, 55, 56, 57 or 60 of the dystrophin pre-mRNA.

12. A method according to claim 11, wherein said first exon is exon 10 and said second exon is exon 12, 13, 14, 15, 16, 18, 20, 22, 23, 25, 26, 27, 28, 29, 30, 31, 32, 33, 34, 35, 36, 37, 38, 39, 40, 41, 42, 44, 46, 47, 48, 49, 51, 53, 55, 57, 59 or 60.

13. A method according to claim 12, wherein the oligonucleotide is functional to induce skipping of dystrophin exons 10 to 18, exons 10 to 30, exons 10 to 42, exons 10 to 47, exons 10 to 57, exons 10 to 60, exons 8 to 19, exons 9 to 22, exons 9 to 30, exons 11 to 23, exons 13 to 30, exons 23 to 42, exons 34 to 53, exons 40 to 53, exons 44 to 56, exons 45 to 51, exons 45 to 53, exons 45 to 55, exons 45 to 60, and/or exons 56 to 60.

14. A method of preventing, delaying, ameliorating and/or treating a disease in a subject, comprising
administering a formulation comprising an oligonucleotide which is functional to bind to a region within a first exon and a a region within a second exon, wherein said region of said second exon has at least 50% identity with said region of said first exon,
wherein said oligonucleotide is not capable of binding to non-exon sequences,
wherein said first and said second exons are within a same pre-mRNA in said subject,
wherein said binding of said oligonucleotide is functional to interfere with at least one splicing regulatory sequence in said regions of said first and second exons and/or with the secondary structure encompassing at least said first and/or said second exon in said pre-mRNA,
wherein said splicing regulatory sequence comprises an exonic splicing enhancer (ESE), an exon recognition sequence (ERS) and/or a binding site for a serine-arginine (SR) protein, or and/or
wherein said binding of said oligonucleotide results in the skipping of said first exon and of said second exon, preferably in the skipping of a multi-exon stretch starting with said first exon and encompassing one or more exons present between said first and said second exons and at the most in the skipping of the entire stretch of exons in between said first and said second exons,
wherein an in-frame transcript is obtained allowing production of an at least partially functional protein and
wherein said oligonucleotide sequence is not part of a formulation comprising a combination of two or more distinct oligonucleotide sequences linked with one or more linker(s).

15. The method of claim 14, wherein said oligonucleotide comprises the base sequence as defined in any one of SEQ ID NO:1679, 1688, 1671 to 1678, 1680 to 1687, 1689 to 1741 or 1778 to 1891, and having a length, which is defined by the number of nucleotides present in said base sequence or which is 1, 2, 3, 4, or 5 nucleotides longer.

16. The method of claim 15, wherein said oligonucleotide comprises the base sequence as defined in any one of SEQ ID NO: 1679, 1688, 1671 to 1678, 1680 to 1687, 1689 to 1741 wherein said part corresponds to the base sequence as defined in any of said sequences with 1, 2, 3, 4 or 5 nucleotides less than defined in said base sequence.

17. The method of claim 16, wherein said oligonucleotide comprises:
(a) the base sequence as defined in any one of SEQ ID NO: 1679 to 1681, 1778, 1812, 1813, 1884 to 1886, 1890, or 1891, and having a length of 25, 26, 27, 28, 29 or 30 nucleotides or SEQ ID NO: 1814 and having a length of 26, 27, 28, 29 or 30 nucleotides; or
(b) the base sequence as defined in SEQ ID NO: 1688, 1689, or 1839 to 1844, and having a length of 26, 27, 28, 29 or 30 nucleotides; or
(c) the base sequence as defined in SEQ ID NO: 1673 or 1674 and having a length of 25, 26, 27, 28, 29 or 30 nucleotides; or
(d) the base sequence as defined in SEQ ID NO: 1675 or 1676 and having a length of 21, 22, 23, 24, 25, 26, 27, 28, 29 or 30 nucleotides; or
(e) the base sequence as defined in SEQ ID NO: 1677 or 1678 and having a length of 25, 26, 27, 28, 29 or 30 nucleotides; or
(f) the base sequence as defined in any one of SEQ ID NO: 1684 to 1686 and having a length of 21, 22, 23, 24, 25, 26, 27, 28, 29 or 30 nucleotides; or
(g) the base sequence as defined in any one of SEQ ID NO: 1704 to 1706 and having a length of 25, 26, 27, 28, 29 or 30 nucleotides, or
(h) the base sequence as defined in any one of SEQ ID NO: 1707 to 1709 and having a length of 23, 24, 25, 26, 27, 28, 29 or 30 nucleotides; or
(i) the base sequence as defined in any one of SEQ ID NO: 1710, 1713 to 1717 and having a length of 23, 24, 25, 26, 27, 28, 29 or 30 nucleotides or
(j) the base sequence as defined in any one of SEQ ID NO: 1815 to 1819 and having a length of 22, 23, 24, 25, 26, 27, 28, 29 or 30 nucleotides, or
(k) the base sequence as defined in any one of SEQ ID NO: 1820, 1824, and having a length of 20, 21, 22, 23, 24, 25, 26, 27, 28, 29 or 30 nucleotides, or
(l) the base sequence as defined in any one of SEQ ID NO: 1826, 1780, 1782, 1832 and having a length of 21, 22, 23, 24, 25, 26, 27, 28, 29 or 30 nucleotides, or
(m) base sequence as defined in any one of SEQ ID NO: 1821, 1825 and having a length of 22, 23, 24, 25, 26, 27, 28, 29 or 30 nucleotides, or
(n) base sequence as defined in any one of SEQ ID NO: 1822 and having a length of 24, 25, 26, 27, 28, 29 or 30 nucleotides, or
(o) base sequence as defined in any one of SEQ ID NO: 1823, 1781, 1829, 1830, 1831 and having a length of 25, 26, 27, 28, 29 or 30 nucleotides, or
(p) base sequence as defined in any one of SEQ ID NO: 1783, 1833, 1834, 1835 and having a length of 17, 18, 19, 20, 21, 22, 23, 24, 25, 26, 27, 28, 29 or 30 nucleotides, or
(q) base sequence as defined in any one of SEQ ID NO: 1887 and and have a length of 24, 25, 26, 27, 28, 29 or 30 nucleotides, or
(r) base sequence as defined in any one of SEQ ID NO: 1888 or 1889 and and have a length of 26, 27, 28, 29 or 30 nucleotides, or
(s) base sequence as defined in SEQ ID NO: 1827 and have a length of 21, 22, 23, 24, 25, 26, 27, 28, 29 or 30 nucleotides, or
(t) base sequence as defined in SEQ ID NO: 1828 and have a length of 25, 26, 27, 28, 29 or 30 nucleotides, or
(u) base sequence as defined in any one of SEQ ID NO: 1784, 1836 and having a length of 21, 22, 23, 24, 25, 26, 27, 28, 29 or 30 nucleotides, or
(v) base sequence as defined in any one of SEQ ID NO: 1786, 1838 and having a length of 25, 26, 27, 28, 29 or 30 nucleotides, or
(w) base sequence as defined in any one of SEQ ID NO: 1780 and having a length of 22, 23, 24, 25, 26, 27, 28, 29 or 30 nucleotides, or
(x) base sequence as defined in any one of SEQ ID NO: 1785, 1837 and having a length of 25, 26, 27, 28, 29 or 30 nucleotides, or
(y) base sequence as defined in any one of SEQ ID NO: 1845, 1846, 1847, 1848 and having a length of 24, 25, 26, 27, 28, 29 or 30 nucleotides, or
(z) base sequence as defined in any one of SEQ ID NO: 1849, 1850 and having a length of 22, 23, 24, 25, 26, 27, 28, 29 or 30 nucleotides, or
(a1) base sequence as defined in any one of SEQ ID NO: 1787, 1851 and having a length of 26, 27, 28, 29 or 30 nucleotides, or
(b1) base sequence as defined in any one of SEQ ID NO: 1788, 1852, 1789, 1853 and having a length of 24, 25, 26, 27, 28, 29 or 30 nucleotides, or
(c1) base sequence as defined in any one of SEQ ID NO: 1790, 1854, 1792, 1855 and having a length of 25, 26, 27, 28, 29 or 30 nucleotides, or
(d1) base sequence as defined in any one of SEQ ID NO: 1794, 1861, 1795, 1862 and having a length of 21, 22, 23, 24, 25, 26, 27, 28, 29 or 30 nucleotides, or
(e1) base sequence as defined in any one of SEQ ID NO: 1796, 1863, 1797, 1864 and having a length of 23, 24, 25, 26, 27, 28, 29 or 30 nucleotides, or
(f1) base sequence as defined in any one of SEQ ID NO: 1798, 1865, 1799, 1866 and having a length of 25, 26, 27, 28, 29 or 30 nucleotides, or
(g1) base sequence as defined in any one of SEQ ID NO: 1808, 1867, 1809, 1868, 1810, 1869, 1858, 1873 and having a length of 21, 22, 23, 24, 25, 26, 27, 28, 29 or 30 nucleotides, or
(h1) base sequence as defined in any one of SEQ ID NO: 1811, 1870, 1859, 1874 and having a length of 22, 23, 24, 25, 26, 27, 28, 29 or 30 nucleotides, or
(i1) base sequence as defined in any one of SEQ ID NO: 1856, 1871, 1860, 1875 and having a length of 23, 24, 25, 26, 27, 28, 29 or 30 nucleotides, or
(j1) base sequence as defined in any one of SEQ ID NO: 1857, 1872 and having a length of 26, 27, 28, 29 or 30 nucleotides, or
(k1) base sequence as defined in any one of SEQ ID NO: 1800, 1876, 1801, 1877 and having a length of 19, 20, 21, 22, 23, 24, 25, 26, 27, 28, 29 or 30 nucleotides, or
(l1) base sequence as defined in any one of SEQ ID NO: 1802, 1878, 1803, 1879 and having a length of 23, 24, 25, 26, 27, 28, 29 or 30 nucleotides, or
(m1) base sequence as defined in any one of SEQ ID NO: 1804, 1880 and having a length of 21, 22, 23, 24, 25, 26, 27, 28, 29 or 30 nucleotides, or
(n1) base sequence as defined in any one of SEQ ID NO: 1805, 1881 and having a length of 22, 23, 24, 25, 26, 27, 28, 29 or 30 nucleotides, or
(o1) base sequence as defined in any one of SEQ ID NO: 1806, 1882, 1807, 1883 and having a length of 20, 21, 22, 23, 24, 25, 26, 27, 28, 29 or 30 nucleotides.

18. A composition comprising an oligonucleotide, and optionally further comprising a pharmaceutically acceptable carrier, diluent, excipient, salt, adjuvant and/or solvent, said oligonucleotide comprising a sequence complementary a first exon, wherein a region of said second exon has at least 50% identity with said region of said first exon, and each of said first and said second exons are independently selected from the group consisting of: exons 10, 18, 30, 8, 9, 11, 13, 19, 22, 23, 34, 40, 42, 44, 45, 47, 51, 53, 55, 56, 57 and 60 of the dystrophin pre-mRNA, wherein said first and said second exons are not the same exon, wherein said oligonucleotide comprises a modification selected from the group consisting of: at least one backbone modification, at least one base modification, at least one sugar modification, and a moiety which is conjugated to said oligonucleotide, wherein said oligonucleotide sequence is not part of a formulation comprising cocktail or a combination of two or more distinct oligonucleotide sequences possibly linked with one or more linker(s).

19. The composition of claim 18, wherein said oligonucleotide comprises said sequence complementary to said first exon, and said first exon is exon 10, and said second exon is exon selected from the group consisting of: 12, 13, 14, 15, 16, 18, 20, 22, 23, 25, 26, 27, 28, 29, 30, 31, 32, 33, 34, 35, 36, 37, 38, 39, 40, 41, 42, 44, 46, 47, 48, 49, 51, 53, 55, 57, 59 and 60.

20. The composition of claim 19, wherein said oligonucleotide is functional to induce skipping of dystrophin exons selected from the group consisting of: exons 10 to 18; exons 10 to 30; exons 10 to 42; exons 10 to 47; exons 10 to 57; exons 10 to 60; exons 8 to 19; exons 9 to 22; exons 9 to 30; exons 11 to 23; exons 13 to 30; exons 23 to 42; exons 34 to 53; exons 40 to 53; exons 44 to 56; exons 45 to 51; exons 45 to 53; exons 45 to 55; exons 45 to 60; and exons 56 to 60.

21. The oligonucleotide of claim 18, wherein said oligonucleotide consists of 10-40 bases, inclusive.

22. A composition comprising an oligonucleotide, wherein said oligonucleotide comprises the base sequence as defined in any one of SEQ ID NO selected from the group consisting of: SEQ ID NO:1679, 1688, 1671 to 1678, 1680 to 1687, 1689 to 1741 and 1778 to 1891, and having a length, which is defined by the number of nucleotides present in said base sequence or which is 1, 2, 3, 4, or 5 nucleotides longer.

23. The composition of claim 22, wherein said oligonucleotides comprises:
(a) the base sequence as defined in any one of SEQ ID NO: 1679 to 1681, 1778, 1812, 1813, 1884 to 1886, 1890, or 1891, and having a length of 25, 26, 27, 28, 29 or 30 nucleotides or SEQ ID NO: 1814 and having a length of 26, 27, 28, 29 or 30 nucleotides; or
(b) the base sequence as defined in SEQ ID NO: 1688, 1689, or 1839 to 1844, and having a length of 26, 27, 28, 29 or 30 nucleotides; or
(c) the base sequence as defined in SEQ ID NO: 1673 or 1674 and having a length of 25, 26, 27, 28, 29 or 30 nucleotides; or
(d) the base sequence as defined in SEQ ID NO: 1675 or 1676 and having a length of 21, 22, 23, 24, 25, 26, 27, 28, 29 or 30 nucleotides; or
(e) the base sequence as defined in SEQ ID NO: 1677 or 1678 and having a length of 25, 26, 27, 28, 29 or 30 nucleotides; or
(f) the base sequence as defined in any one of SEQ ID NO: 1684 to 1686 and having a length of 21, 22, 23, 24, 25, 26, 27, 28, 29 or 30 nucleotides; or
(g) the base sequence as defined in any one of SEQ ID NO: 1704 to 1706 and having a length of 25, 26, 27, 28, 29 or 30 nucleotides, or
(h) the base sequence as defined in any one of SEQ ID NO: 1707 to 1709 and having a length of 23, 24, 25, 26, 27, 28, 29 or 30 nucleotides; or
(i) the base sequence as defined in any one of SEQ ID NO: 1710, 1713 to 1717 and having a length of 23, 24, 25, 26, 27, 28, 29 or 30 nucleotides or
(j) the base sequence as defined in any one of SEQ ID NO: 1815 to 1819 and having a length of 22, 23, 24, 25, 26, 27, 28, 29 or 30 nucleotides, or
(k) the base sequence as defined in any one of SEQ ID NO: 1820, 1824, and having a length of 20, 21, 22, 23, 24, 25, 26, 27, 28, 29 or 30 nucleotides, or
(l) the base sequence as defined in any one of SEQ ID NO: 1826, 1780, 1782, 1832 and having a length of 21, 22, 23, 24, 25, 26, 27, 28, 29 or 30 nucleotides, or
(m) base sequence as defined in any one of SEQ ID NO: 1821, 1825 and having a length of 22, 23, 24, 25, 26, 27, 28, 29 or 30 nucleotides, or
(n) base sequence as defined in any one of SEQ ID NO: 1822 and having a length of 24, 25, 26, 27, 28, 29 or 30 nucleotides, or
(o) base sequence as defined in any one of SEQ ID NO: 1823, 1781, 1829, 1830, 1831 and having a length of 25, 26, 27, 28, 29 or 30 nucleotides, or
(p) base sequence as defined in any one of SEQ ID NO: 1783, 1833, 1834, 1835 and having a length of 17, 18, 19, 20, 21, 22, 23, 24, 25, 26, 27, 28, 29 or 30 nucleotides, or
(q) base sequence as defined in any one of SEQ ID NO: 1887 and and have a length of 24, 25, 26, 27, 28, 29 or 30 nucleotides, or
(r) base sequence as defined in any one of SEQ ID NO: 1888 or 1889 and and have a length of 26, 27, 28, 29 or 30 nucleotides, or
(s) base sequence as defined in SEQ ID NO: 1827 and have a length of 21, 22, 23, 24, 25, 26, 27, 28, 29 or 30 nucleotides, or
(t) base sequence as defined in SEQ ID NO: 1828 and have a length of 25, 26, 27, 28, 29 or 30 nucleotides, or
(u) base sequence as defined in any one of SEQ ID NO: 1784, 1836 and having a length of 21, 22, 23, 24, 25, 26, 27, 28, 29 or 30 nucleotides, or
(v) base sequence as defined in any one of SEQ ID NO: 1786, 1838 and having a length of 25, 26, 27, 28, 29 or 30 nucleotides, or
(w) base sequence as defined in any one of SEQ ID NO: 1780 and having a length of 22, 23, 24, 25, 26, 27, 28, 29 or 30 nucleotides, or
(x) base sequence as defined in any one of SEQ ID NO: 1785, 1837 and having a length of 25, 26, 27, 28, 29 or 30 nucleotides, or
(y) base sequence as defined in any one of SEQ ID NO: 1845, 1846, 1847, 1848 and having a length of 24, 25, 26, 27, 28, 29 or 30 nucleotides, or
(z) base sequence as defined in any one of SEQ ID NO: 1849, 1850 and having a length of 22, 23, 24, 25, 26, 27, 28, 29 or 30 nucleotides, or
(a1) base sequence as defined in any one of SEQ ID NO: 1787, 1851 and having a length of 26, 27, 28, 29 or 30 nucleotides, or
(b1) base sequence as defined in any one of SEQ ID NO: 1788, 1852, 1789, 1853 and having a length of 24, 25, 26, 27, 28, 29 or 30 nucleotides, or
(c1) base sequence as defined in any one of SEQ ID NO: 1790, 1854, 1792, 1855 and having a length of 25, 26, 27, 28, 29 or 30 nucleotides, or
(d1) base sequence as defined in any one of SEQ ID NO: 1794, 1861, 1795, 1862 and having a length of 21, 22, 23, 24, 25, 26, 27, 28, 29 or 30 nucleotides, or
(e1) base sequence as defined in any one of SEQ ID NO: 1796, 1863, 1797, 1864 and having a length of 23, 24, 25, 26, 27, 28, 29 or 30 nucleotides, or
(f1) base sequence as defined in any one of SEQ ID NO: 1798, 1865, 1799, 1866 and having a length of 25, 26, 27, 28, 29 or 30 nucleotides, or
(g1) base sequence as defined in any one of SEQ ID NO: 1808, 1867, 1809, 1868, 1810, 1869, 1858, 1873 and having a length of 21, 22, 23, 24, 25, 26, 27, 28, 29 or 30 nucleotides, or
(h1) base sequence as defined in any one of SEQ ID NO: 1811, 1870, 1859, 1874 and having a length of 22, 23, 24, 25, 26, 27, 28, 29 or 30 nucleotides, or
(i1) base sequence as defined in any one of SEQ ID NO: 1856, 1871, 1860, 1875 and having a length of 23, 24, 25, 26, 27, 28, 29 or 30 nucleotides, or
(j1) base sequence as defined in any one of SEQ ID NO: 1857, 1872 and having a length of 26, 27, 28, 29 or 30 nucleotides, or
(k1) base sequence as defined in any one of SEQ ID NO: 1800, 1876, 1801, 1877 and having a length of 19, 20, 21, 22, 23, 24, 25, 26, 27, 28, 29 or 30 nucleotides, or
(l1) base sequence as defined in any one of SEQ ID NO: 1802, 1878, 1803, 1879 and having a length of 23, 24, 25, 26, 27, 28, 29 or 30 nucleotides, or
(m1) base sequence as defined in any one of SEQ ID NO: 1804, 1880 and having a length of 21, 22, 23, 24, 25, 26, 27, 28, 29 or 30 nucleotides, or
(n1) base sequence as defined in any one of SEQ ID NO: 1805, 1881 and having a length of 22, 23, 24, 25, 26, 27, 28, 29 or 30 nucleotides, or
(o1) base sequence as defined in any one of SEQ ID NO: 1806, 1882, 1807, 1883 and having a length of 20, 21, 22, 23, 24, 25, 26, 27, 28, 29 or 30 nucleotides; and
wherein said oligonucleotide comprises a modification selected from the group consisting of: at least one backbone modification, at least one base modification, at least one sugar modification, and a moiety which is conjugated to said oligonucleotide.

The application's sequence listing, which the Patent Office published only in electronic form, follows.

SEQUENCE LISTING (1891 sequences)

SEQ ID NO: 1 - protein, 3685 aa, Homo sapiens
MLWWEEVEDCYEREDVQKKTFTKWVNAQFSKFGKQHIENLFSDLQDGRRLLDLLEGLTGQKLPKEKGSTRVHALNNVNKALRVLQNNNVDLVNIGSTDIVDGNHKLTLGLIWNIILHWQVKNVMKNIMAGLQQTNSEKILLSWVRQSTRNYPQVNVINFTTSWSDGLALNALIHSHRPDLFDWNSVVCQQSATQRLEHAFNIARYQLGIEKLLDPEDVDTTYPDKKSILMYITSLFQVLPQQVSIEAIQEVEMLPRPPKVTKEEHFQLHHQMHYSQQITVSLAQGYERTSSPKPRFKSYAYTQAAYVTTSDPTRSPFPSQHLEAPEDKSFGSSLMESEVNLDRYQTALEEVLSWLLSAEDTLQAQGEISNDVEVVKDQFHTHEGYMMDLTAHQGRVGNILQLGSKLIGTGKLSEDEETEVQEQMNLLNSRWECLRVASMEKQSNLHRVLMDLQNQKLKELNDWLTKTEERTRKMEEEPLGPDLEDLKRQVQQHKVLQEDLEQEQVRVNSLTHMVVVVDESSGDHATAALEEQLKVLGDRWANICRWTEDRWVLLQDILLKWQRLTEEQCLFSAWLSEKEDAVNKIHTTGFKDQNEMLSSLQKLAVLKADLEKKKQSMGKLYSLKQDLLSTLKNKSVTQKTEAWLDNFARCWDNLVQKLEKSTAQISQAVTTTQPSLTQTTVMETVTTVTTREQILVKHAQEELPPPPPQKKRQITVDSEIRKRLDVDITELHSWITRSEAVLQSPEFAIFRKEGNFSDLKEKVNAIEREKAEKFRKLQDASRSAQALVEQMVNEGVNADSIKQASEQLNSRWIEFCQLLSERLNWLEYQNNIIAFYNQLQQLEQMTTTAENWLKIQPTTPSEPTAIKSQLKICKDEVNRLSGLQPQIERLKIQSIALKEKGQGPMFLDADFVAFTNHFKQVFSDVQAREKELQTIFDTLPPMRYQETMSAIRTWVQQSETKLSIPQLSVTDYEIMEQRLGELQALQSSLQEQQSGLYYLSTTVKEMSKKAPSEISRKYQSEFEEIEGRWKKLSSQLVEHCQKLEEQMNKLRKIQNHIQTLKKWMAEVDVFLKEEWPALGDSEILKKQLKQCRLLVSDIQTIQPSLNSVNEGGQKIKNEAEPEFASRLETELKELNTQWDHMCQQVYARKEALKGGLEKTVSLQKDLSEMHEWMTQAEEEYLERDFEYKTPDELQKAVEEMKRAKEEAQQKEAKVKLLTESVNSVIAQAPPVAQEALKKELETLTTNYQWLCTRLNGKCKTLEEVWACWHELLSYLEKANKWLNEVEFKLKTTENIPGGAEEISEVLDSLENLMRHSEDNPNQIRILAQTLTDGGVMDELINEELETFNSRWRELHEEAVRRQKLLEQSIQSAQETEKSLHLIQESLTFIDKQLAAYIADKVDAAQMPQEAQKIQSDLTSHEISLEEMKKHNQGKEAAQRVLSQIDVAQKKLQDVSMKFRLFQKPANFEQRLQESKMILDEVKMHLPALETKSVEQEVVQSQLNHCVNLYKSLSEVKSEVEMVIKTGRQIVQKKQTENPKELDERVTALKLHYNELGAKVTERKQQLEKCLKLSRKMRKEMNVLTEWLAATDMELTKRSAVEGMPSNLDSEVAWGKATQKEIEKQKVHLKSITEVGEALKTVLGKKETLVEDKLSLLNSNWIAVTSRAEEWLNLLLEYQKHMETFDQNVDHITKWIIQADTLLDESEKKKPQQKEDVLKRLKAELNDIRPKVDSTRDQAANLMANRGDHCRKLVEPQISELNHRFAAISHRIKTGKASIPLKELEQFNSDIQKLLEPLEAEIQQGVNLKEEDFNKDMNEDNEGTVKELLQRGDNLQQRITDERKREEIKIKQQLLQTKHNALKDLRSQRRKKALEISHQWYQYKRQADDLLKCLDDIEKKLASLPEPRDERKIKEIDRELQKKKEELNAVRRQAEGLSEDGAAMAVEPTQIQLSKRWREIESKFAQFRRLNFAQIHTVREETMMVMTEDMPLEISYVPSTYLTEITHVSQALLEVEQLLNAPDLCAKDFEDLFKQEESLKNIKDSLQQSSGRIDIIHSKKTAALQSATPVERVKLQEALSQLDFQWEKVNKMYKDRQGRFDRSVEKWRRFHYDIKIFNQWLTEAEQFLRKTQIPENWEHAKYKWYLKELQDGIGQRQTVVRTLNATGEEIIQQSSKTDASILQEKLGSLNLRWQEVCKQLSDRKKRLEEQKNILSEFQRDLNEFVLWLEEADNIASIPLEPGKEQQLKEKLEQVKLLVEELPLRQGILKQLNETGGPVLVSAPISPEEQDKLENKLKQTNLQWIKVSRALPEKQGEIEAQIKDLGQLEKKLEDLEEQLNHLLLWLSPIRNQLEIYNQPNQEGPFDVQETEIAVQAKQPDVEEILSKGQHLYKEKPATQPVKRKLEDLSSEWKAVNRLLQELRAKQPDLAPGLTTIGASPTQTVTLVTQPVVTKETAISKLEMPSSLMLEVPALADFNRAWTELTDWLSLLDQVIKSQRVMVGDLEDINEMIIKQKATMQDLEQRRPQLEELITAAQNLKNKTSNQEARTIITDRIERIQNQWDEVQEHLQNRRQQLNEMLKDSTQWLEAKEEAEQVLGQARAKLESWKEGPYTVDAIQKKITETKQLAKDLRQWQTNVDVANDLALKLLRDYSADDTRKVHMITENINASWRSIHKRVSEREAALEETHRLLQQFPLDLEKFLAWLTEAETTANVLQDATRKERLLEDSKGVKELMKQWQDLQGEIEAHTDVYHNLDENSQKILRSLEGSDDAVLLQRRLDNMNFKWSELRKKSLNIRSHLEASSDQWKRLHLSLQELLVWLQLKDDELSRQAPIGGDFPAVQKQNDVHRAFKRELKTKEPVIMSTLETVRIFLTEQPLEGLEKLYQEPRELPPEERAQNVTRLLRKQAEEVNTEWEKLNLHSADWQRKIDETLERLQELQEATDELDLKLRQAEVIKGSWQPVGDLLIDSLQDHLEKVKALRGEIAPLKENVSHVNDLARQLTTLGIQLSPYNLSTLEDLNTRWKLLQVAVEDRVRQLHEAHRDFGPASQHFLSTSVQGPWERAISPNKVPYYINHETQTTCWDHPKMTELYQSLADLNNVRFSAYRTAMKLRRLQKALCLDLLSLSAACDALDQHNLKQNDQPMDILQIINCLTTIYDRLEQEHNNLVNVPLCVDMCLNWLLNVYDTGRTGRIRVLSFKTGIISLCKAHLEDKYRYLFKQVASSTGFCDQRRLGLLLHDSIQIPRQLGEVASFGGSNIEPSVRSCFQFANNKPEIEAALFLDWMRLEPQSMVWLPVLHRVAAAETAKHQAKCNICKECPIIGFRYRSLKHFNYDICQSCFFSGRVAKGHKMHYPMVEYCTPTTSGEDVRDFAKVLKNKFRTKRYFAKHPRMGYLPVQTVLEGDNMETPVTLINFWPVDSAPASSPQLSHDDTHSRIEHYASRLAEMENSNGSYLNDSISPNESIDDEHLLIQHYCQSLNQDSPLSQPRSPAQILISLESEERGELERILADLEEENRNLQAEYDRLKQQHEHKGLSPLPSPPEMMPTSPQSPRDAELIAEAKLLRQHKGRLEARMQILEDHNKQLESQLHRLRQLLEQPQAEAKVNGTTVSSPSTSLQRSDSSQPMLLRVVGSQTSDSMGEEDLLSPPQDTSTGLEEVMEQLNNSFPSSRGRNTPGKPMREDTM

SEQ ID NO: 2 - RNA, 182 nt, Artificial
  Exon 8 of the human dystrophin transcript
auguugauaccaccuauccagauaagaaguccaucuuaauguacaucacaucacucuuccaaguuuugccucaacaagugagcauugaagccauccaggaaguggaaauguugccaaggccaccuaaagugacuaaagaagaacauuuucaguuacaucaucaaaugcacuauucucaacag

SEQ ID NO: 3 - RNA, 129 nt, Artificial
  Exon 9 of the human dystrophin transcript
aucacggucagucuagcacagggauaugagagaacuucuuccccuaagccucgauucaagagcuaugccuacacacaggcugcuuaugucaccaccucugacccuacacggagcccauuuccuucacag

SEQ ID NO: 4 - RNA, 189 nt, Artificial
  Exon 10 of the human dystrophin transcript
cauuuggaagcuccugaagacaagucauuuggcaguucauugauggagagugaaguaaaccuggaccguuaucaaacagcuuuagaagaaguauuaucguggcuucuuucugcugaggacacauugcaagcacaaggagagauuucuaaugauguggaaguggugaaagaccaguuucauacucaugag

SEQ ID NO: 5 - RNA, 124 nt, Artificial
  Exon 18 of the human dystrophin transcript
guuggauguugauauaacugaacuucacagcuggauuacucgcucagaagcuguguugcagaguccugaauuugcaaucuuucggaaggaaggcaacuucucagacuuaaaagaaaaagucaau

SEQ ID NO: 6 - RNA, 88 nt, Artificial
  Exon 19 of the human dystrophin transcript
gccauagagcgagaaaaagcugagaaguucagaaaacugcaagaugccagcagaucagcucaggcccugguggaacagauggugaaug

SEQ ID NO: 7 - RNA, 146 nt, Artificial
  Exon 22 of the human dystrophin transcript
uuuuugacacuuugccaccaaugcgcuaucaggagaccaugagugccaucaggacauggguccagcagucagaaaccaaacucuccauaccucaacuuagugucaccgacuaugaaaucauggagcagagacucggggaauugcag

SEQ ID NO: 8 - RNA, 213 nt, Artificial
  Exon 23 of the human dystrophin transcript
gcuuuacaaaguucucugcaagagcaacaaaguggccuauacuaucucagcaccacugugaaagagaugucgaagaaagcgcccucugaaauuagccggaaauaucaaucagaauuugaagaaauugagggacgcuggaagaagcucuccucccagcugguugagcauugucaaaagcuagaggagcaaaugaauaaacuccgaaaaauucag

SEQ ID NO: 9 - RNA, 162 nt, Artificial
  Exon 30 of the human dystrophin transcript
gcuguaaggaggcaaaaguugcuugaacagagcauccagucugcccaggagacugaaaaauccuuacacuuaauccaggagucccucacauucauugacaagcaguuggcagcuuauauugcagacaagguggacgcagcucaaaugccucaggaagcccag

SEQ ID NO: 10 - RNA, 150 nt, Artificial
  Exon 47 of the human dystrophin transcript
uuacugguggaagaguugccccugcgccagggaauucucaaacaauuaaaugaaacuggaggacccgugcuuguaagugcucccauaagcccagaagagcaagauaaacuugaaaauaagcucaagcagacaaaucuccaguggauaaag

SEQ ID NO: 11 - RNA, 195 nt, Artificial
  Exon 42 of the human dystrophin transcript
cacacuguccgugaagaaacgaugauggugaugacugaagacaugccuuuggaaauuucuuaugugccuucuacuuauuugacugaaaucacucaugucucacaagcccuauuagaaguggaacaacuucucaaugcuccugaccucugugcuaaggacuuugaagaucucuuuaagcaagaggagucucugaag

SEQ ID NO: 12 - RNA, 176 nt, Artificial
  Exon 45 of the human dystrophin transcript
gaacuccaggauggcauugggcagcggcaaacuguugucagaacauugaaugcaacuggggaagaaauaauucagcaauccucaaaaacagaugccaguauucuacaggaaaaauugggaagccugaaucugcgguggcaggaggucugcaaacagcugucagacagaaaaaagag

SEQ ID NO: 13 - RNA, 212 nt, Artificial
  Exon 53 of the human dystrophin transcript
uugaaagaauucagaaucagugggaugaaguacaagaacaccuucagaaccggaggcaacaguugaaugaaauguuaaaggauucaacacaauggcuggaagcuaaggaagaagcugagcaggucuuaggacaggccagagccaagcuugagucauggaaggagggucccuauacaguagaugcaauccaaaagaaaaucacagaaaccaag

SEQ ID NO: 14 - RNA, 190 nt, Artificial
  Exon 55 of the human dystrophin transcript
ggugagugagcgagaggcugcuuuggaagaaacucauagauuacugcaacaguucccccuggaccuggaaaaguuucuugccuggcuuacagaagcugaaacaacugccaauguccuacaggaugcuacccguaaggaaaggcuccuagaagacuccaagggaguaaaagagcugaugaaacaauggcaa

SEQ ID NO: 15 - RNA, 173 nt, Artificial
  Exon 56 of the human dystrophin transcript
gaccuccaaggugaaauugaagcucacacagauguuuaucacaaccuggaugaaaacagccaaaaaauccugagaucccuggaagguuccgaugaugcaguccuguuacaaagacguuuggauaacaugaacuucaaguggagugaacuucggaaaaagucucucaacauuag

SEQ ID NO: 16 - RNA, 147 nt, Artificial
  Exon 60 of the human dystrophin transcript
gcacuucgaggagaaauugcgccucugaaagagaacgugagccacgucaaugaccuugcucgccagcuuaccacuuugggcauucagcucucaccguauaaccucagcacucuggaagaccugaacaccagauggaagcuucugcag

SEQ ID NO: 17 - RNA, 14 nt, Artificial
  Part of exon 8 of the human dystrophin transcript
agauaagaagucca

SEQ ID NO: 18 - RNA, 14 nt, Artificial
  Part of exon 19 of the human dystrophin transcript
agcugagaaguuca

SEQ ID NO: 19 - RNA, 34 nt, Artificial
  Part of exon 8 of the human dystrophin transcript
accuauccagauaagaaguccaucuuaauguaca

SEQ ID NO: 20 - RNA, 35 nt, Artificial
  Part of exon 21 of the human dystrophin transcript
acaaaucauuuuaagcaagucuuuucugaugugca

SEQ ID NO: 21 - RNA, 28 nt, Artificial
  Part of exon 8 of the human dystrophin transcript
uuugccucaacaagugagcauugaagcc

SEQ ID NO: 22 - RNA, 30 nt, Artificial
  Part of exon 50 of the human dystrophin transcript
uuuacuucaagagcugagggcaaagcagcc

SEQ ID NO: 23 - RNA, 21 nt, Artificial
  Part of exon 8 of the human dystrophin transcript
gaagccauccaggaaguggaa

SEQ ID NO: 24 - RNA, 21 nt, Artificial
  Part of exon 52 of the human dystrophin transcript
gcaacaaugcaggauuuggaa

SEQ ID NO: 25 - RNA, 15 nt, Artificial
  Part of exon 8 of the human dystrophin transcript
caagugagcauugaa

SEQ ID NO: 26 - RNA, 15 nt, Artificial
  Part of exon 58 of the human dystrophin transcript
caagagggaauugaa

SEQ ID NO: 27 - RNA, 14 nt, Artificial
  Part of exon 9 of the human dystrophin transcript
cuagcacagggaua

SEQ ID NO: 28 - RNA, 14 nt, Artificial
  Part of exon 10 of the human dystrophin transcript
caagcacaaggaga

SEQ ID NO: 29 - RNA, 29 nt, Artificial
  Part of exon 9 of the human dystrophin transcript
gucagucuagcacagggauaugagagaac

SEQ ID NO: 30 - RNA, 29 nt, Artificial
  Part of exon 12 of the human dystrophin transcript
gacuggcuaacaaaaacagaagaaagaac

SEQ ID NO: 31 - RNA, 21 nt, Artificial
  Part of exon 9 of the human dystrophin transcript
ucuagcacagggauaugagag

SEQ ID NO: 32 - RNA, 21 nt, Artificial
  Part of exon 13 of the human dystrophin transcript
ucuagaacaagaacaagucag

SEQ ID NO: 33 - RNA, 30 nt, Artificial
  Part of exon 9 of the human dystrophin transcript
acacaggcugcuuaugucaccaccucugac

SEQ ID NO: 34 - RNA, 30 nt, Artificial
  Part of exon 14 of the human dystrophin transcript
agacauccuucucaaauggcaacgucuuac

SEQ ID NO: 35 - RNA, 23 nt, Artificial
  Part of exon 9 of the human dystrophin transcript
ucuagcacagggauaugagagaa

SEQ ID NO: 36 - RNA, 23 nt, Artificial
  Part of exon 15 of the human dystrophin transcript
uuuagugcauggcuuucagaaaa

SEQ ID NO: 37 - RNA, 32 nt, Artificial
  Part of exon 9 of the human dystrophin transcript
uaugccuacacacaggcugcuuaugucaccac

SEQ ID NO: 38 - RNA, 31 nt, Artificial
  Part of exon 16 of the human dystrophin transcript
uauucacucaaacaagaucuucuuucaacac

SEQ ID NO: 39 - RNA, 16 nt, Artificial
  Part of exon 9 of the human dystrophin transcript
gauaugagagaacuuc

SEQ ID NO: 40 - RNA, 16 nt, Artificial
  Part of exon 18 of the human dystrophin transcript
gauauaacugaacuuc

SEQ ID NO: 41 - RNA, 19 nt, Artificial
  Part of exon 9 of the human dystrophin transcript
caccaccucugacccuaca

SEQ ID NO: 42 - RNA, 19 nt, Artificial
  Part of exon 20 of the human dystrophin transcript
caccccaucagagccaaca

SEQ ID NO: 43 - RNA, 19 nt, Artificial
  Part of exon 9 of the human dystrophin transcript
cuuaugucaccaccucuga

SEQ ID NO: 44 - RNA, 19 nt, Artificial
  Part of exon 22 of the human dystrophin transcript
cuuagugucaccgacuaug

SEQ ID NO: 45 - RNA, 16 nt, Artificial
  Part of exon 9 of the human dystrophin transcript
uaugucaccaccucug

SEQ ID NO: 46 - RNA, 16 nt, Artificial
  Part of exon 23 of the human dystrophin transcript
uaucucagcaccacug

SEQ ID NO: 47 - RNA, 25 nt, Artificial
  Part of exon 9 of the human dystrophin transcript
cagggauaugagagaacuucuuccc

SEQ ID NO: 48 - RNA, 25 nt, Artificial
  Part of exon 25 of the human dystrophin transcript
cagugauauucagacaauucagccc

SEQ ID NO: 49 - RNA, 22 nt, Artificial
  Part of exon 9 of the human dystrophin transcript
uaagccucgauucaagagcuau

SEQ ID NO: 50 - RNA, 21 nt, Artificial
  Part of exon 26 of the human dystrophin transcript
uaagccuccagaaagaucuau

SEQ ID NO: 51 - RNA, 19 nt, Artificial
  Part of exon 9 of the human dystrophin transcript
accaccucugacccuacac

SEQ ID NO: 52 - RNA, 19 nt, Artificial
  Part of exon 27 of the human dystrophin transcript
acuaccaguggcucugcac

SEQ ID NO: 53 - RNA, 18 nt, Artificial
  Part of exon 9 of the human dystrophin transcript
ggauaugagagaacuucu

SEQ ID NO: 54 - RNA, 18 nt, Artificial
  Part of exon 28 of the human dystrophin transcript
ggagcugaggaaaucucu

SEQ ID NO: 55 - RNA, 26 nt, Artificial
  Part of exon 9 of the human dystrophin transcript
agggauaugagagaacuucuuccccu

SEQ ID NO: 56 - RNA, 26 nt, Artificial
  Part of exon 29 of the human dystrophin transcript
aggaacuugagacauuuaauucucgu

SEQ ID NO: 57 - RNA, 49 nt, Artificial
  Part of exon 9 of the human dystrophin transcript
cagucuagcacagggauaugagagaacuucuuccccuaagccucgauuc

SEQ ID NO: 58 - RNA, 47 nt, Artificial
  Part of exon 30 of the human dystrophin transcript
cagucugcccaggagacugaaaaauccuuacacuuaauccaggaguc

SEQ ID NO: 59 - RNA, 36 nt, Artificial
  Part of exon 9 of the human dystrophin transcript
ggucagucuagcacagggauaugagagaacuucuuc

SEQ ID NO: 60 - RNA, 32 nt, Artificial
  Part of exon 31 of the human dystrophin transcript
gaucaguuuagaagaaaugaagaaacauaauc

SEQ ID NO: 61 - RNA, 38 nt, Artificial
  Part of exon 9 of the human dystrophin transcript
uucuuccccuaagccucgauucaagagcuaugccuaca

SEQ ID NO: 62 - RNA, 38 nt, Artificial
  Part of exon 32 of the human dystrophin transcript
uuauuccagaaaccagccaauuuugagcagcgucuaca

SEQ ID NO: 63 - RNA, 21 nt, Artificial
  Part of exon 9 of the human dystrophin transcript
cccuaagccucgauucaagag

SEQ ID NO: 64 - RNA, 22 nt, Artificial
  Part of exon 33 of the human dystrophin transcript
cccaaagaacuugaugaaagag

SEQ ID NO: 65 - RNA, 62 nt, Artificial
  Part of exon 9 of the human dystrophin transcript
gggauaugagagaacuucuuccccuaagccucgauucaagagcuaugccuacacacaggcug

SEQ ID NO: 66 - RNA, 63 nt, Artificial
  Part of exon 34 of the human dystrophin transcript
gagaaaugcuugaaauugucccguaagaugcgaaaggaaaugaaugucuugacagaauggcug

SEQ ID NO: 67 - RNA, 28 nt, Artificial
  Part of exon 9 of the human dystrophin transcript
agucuagcacagggauaugagagaacuu

SEQ ID NO: 68 - RNA, 28 nt, Artificial
  Part of exon 35 of the human dystrophin transcript
agaguaucacagagguaggagaggccuu

SEQ ID NO: 69 - RNA, 27 nt, Artificial
  Part of exon 9 of the human dystrophin transcript
ucagucuagcacagggauaugagagaa

SEQ ID NO: 70 - RNA, 33 nt, Artificial
  Part of exon 36 of the human dystrophin transcript
ucaggcugacacacuuuuggaugaaucagagaa

SEQ ID NO: 71 - RNA, 32 nt, Artificial
  Part of exon 9 of the human dystrophin transcript
cagucuagcacagggauaugagagaacuucuu

SEQ ID NO: 72 - RNA, 30 nt, Artificial
  Part of exon 38 of the human dystrophin transcript
caguuuaacucagauauacaaaaauugcuu

SEQ ID NO: 73 - RNA, 15 nt, Artificial
  Part of exon 9 of the human dystrophin transcript
caggcugcuuauguc

SEQ ID NO: 74 - RNA, 15 nt, Artificial
  Part of exon 40 of the human dystrophin transcript
caggcugaugaucuc

SEQ ID NO: 75 - RNA, 13 nt, Artificial
  Part of exon 9 of the human dystrophin transcript
ccaccucugaccc

SEQ ID NO: 76 - RNA, 13 nt, Artificial
  Part of exon 41 of the human dystrophin transcript
ccaacucagaucc

SEQ ID NO: 77 - RNA, 17 nt, Artificial
  Part of exon 9 of the human dystrophin transcript
gauaugagagaacuucu

SEQ ID NO: 78 - RNA, 17 nt, Artificial
  Part of exon 42 of the human dystrophin transcript
gaaguggaacaacuucu

SEQ ID NO: 79 - RNA, 16 nt, Artificial
  Part of exon 9 of the human dystrophin transcript
gggauaugagagaacu

SEQ ID NO: 80 - RNA, 16 nt, Artificial
  Part of exon 44 of the human dystrophin transcript
gcgauuugacagaucu

SEQ ID NO: 81 - RNA, 34 nt, Artificial
  Part of exon 9 of the human dystrophin transcript
gucagucuagcacagggauaugagagaacuucuu

SEQ ID NO: 82 - RNA, 34 nt, Artificial
  Part of exon 46 of the human dystrophin transcript
gucagaauuucaaagagauuuaaaugaauuuguu

SEQ ID NO: 83 - RNA, 15 nt, Artificial
  Part of exon 9 of the human dystrophin transcript
uccccuaagccucga

SEQ ID NO: 84 - RNA, 15 nt, Artificial
  Part of exon 47 of the human dystrophin transcript
ucccauaagcccaga

SEQ ID NO: 85 - RNA, 27 nt, Artificial
  Part of exon 9 of the human dystrophin transcript
gauucaagagcuaugccuacacacagg

SEQ ID NO: 86 - RNA, 28 nt, Artificial
  Part of exon 48 of the human dystrophin transcript
guuuccagagcuuuaccugagaaacaag

SEQ ID NO: 87 - RNA, 34 nt, Artificial
  Part of exon 9 of the human dystrophin transcript
ggucagucuagcacagggauaugagagaacuucu

SEQ ID NO: 88 - RNA, 35 nt, Artificial
  Part of exon 49 of the human dystrophin transcript
guucaagcuaaacaaccggauguggaagagauuuu

SEQ ID NO: 89 - RNA, 35 nt, Artificial
  Part of exon 9 of the human dystrophin transcript
cacggucagucuagcacagggauaugagagaacuu

SEQ ID NO: 90 - RNA, 35 nt, Artificial
  Part of exon 51 of the human dystrophin transcript
cucuggcagauuucaaccgggcuuggacagaacuu

SEQ ID NO: 91 - RNA, 14 nt, Artificial
  Part of exon 9 of the human dystrophin transcript
cuacacacaggcug

SEQ ID NO: 92 - RNA, 14 nt, Artificial
  Part of exon 53 of the human dystrophin transcript
caacacaauggcug

SEQ ID NO: 93 - RNA, 29 nt, Artificial
  Part of exon 9 of the human dystrophin transcript
gucuagcacagggauaugagagaacuucu

SEQ ID NO: 94 - RNA, 28 nt, Artificial
  Part of exon 57 of the human dystrophin transcript
gucugcaccuuucucugcaggaacuucu

SEQ ID NO: 95 - RNA, 20 nt, Artificial
  Part of exon 9 of the human dystrophin transcript
caggcugcuuaugucaccac

SEQ ID NO: 96 - RNA, 20 nt, Artificial
  Part of exon 59 of the human dystrophin transcript
caggcugaggaggucaauac

SEQ ID NO: 97 - RNA, 16 nt, Artificial
  Part of exon 9 of the human dystrophin transcript
caccucugacccuaca

SEQ ID NO: 98 - RNA, 16 nt, Artificial
  Part of exon 60 of the human dystrophin transcript
cagcucucaccguaua

SEQ ID NO: 99 - RNA, 40 nt, Artificial
  Part of exon 10 of the human dystrophin transcript
ugauguggaaguggugaaagaccaguuucauacucaugag

SEQ ID NO: 100 - RNA, 40 nt, Artificial
  Part of exon 12 of the human dystrophin transcript
ugaucuugaagaccuaaaacgccaaguacaacaacauaag

SEQ ID NO: 101 - RNA, 22 nt, Artificial
  Part of exon 10 of the human dystrophin transcript
ucaaacagcuuuagaagaagua

SEQ ID NO: 102 - RNA, 22 nt, Artificial
  Part of exon 13 of the human dystrophin transcript
ucaagaagaucuagaacaagaa

SEQ ID NO: 103 - RNA, 37 nt, Artificial
  Part of exon 10 of the human dystrophin transcript
caaacagcuuuagaagaaguauuaucguggcuucuuu

SEQ ID NO: 104 - RNA, 39 nt, Artificial
  Part of exon 14 of the human dystrophin transcript
caaacaucuguagauggacagaagaccgcuggguucuuu

SEQ ID NO: 105 - RNA, 31 nt, Artificial
  Part of exon 10 of the human dystrophin transcript
acagcuuuagaagaaguauuaucguggcuuc

SEQ ID NO: 106 - RNA, 31 nt, Artificial
  Part of exon 15 of the human dystrophin transcript
aaagaucaaaaugaaauguuaucaagucuuc

SEQ ID NO: 107 - RNA, 39 nt, Artificial
  Part of exon 10 of the human dystrophin transcript
aguaaaccuggaccguuaucaaacagcuuuagaagaagu

SEQ ID NO: 108 - RNA, 38 nt, Artificial
  Part of exon 16 of the human dystrophin transcript
acucaaacaagaucuucuuucaacacugaagaauaagu

SEQ ID NO: 109 - RNA, 34 nt, Artificial
  Part of exon 10 of the human dystrophin transcript
auuuggaagcuccugaagacaagucauuuggcag

SEQ ID NO: 110 - RNA, 35 nt, Artificial
  Part of exon 18 of the human dystrophin transcript
auuugcaaucuuucggaaggaaggcaacuucucag

SEQ ID NO: 111 - RNA, 22 nt, Artificial
  Part of exon 10 of the human dystrophin transcript
aucaaacagcuuuagaagaagu

SEQ ID NO: 112 - RNA, 23 nt, Artificial
  Part of exon 20 of the human dystrophin transcript
aucaaacaagccucagaacaacu

SEQ ID NO: 113 - RNA, 15 nt, Artificial
  Part of exon 10 of the human dystrophin transcript
gacacauugcaagca

SEQ ID NO: 114 - RNA, 15 nt, Artificial
  Part of exon 22 of the human dystrophin transcript
gacacuuugccacca

SEQ ID NO: 115 - RNA, 42 nt, Artificial
  Part of exon 10 of the human dystrophin transcript
ugaaguaaaccuggaccguuaucaaacagcuuuagaagaagu

SEQ ID NO: 116 - RNA, 39 nt, Artificial
  Part of exon 23 of the human dystrophin transcript
ugaaauuagccggaaauaucaaucagaauuugaagaaau

SEQ ID NO: 117 - RNA, 42 nt, Artificial
  Part of exon 10 of the human dystrophin transcript
aaaccuggaccguuaucaaacagcuuuagaagaaguauuauc

SEQ ID NO: 118 - RNA, 43 nt, Artificial
  Part of exon 25 of the human dystrophin transcript
agacuugagacagaacucaaagaacuuaacacucagugggauc

SEQ ID NO: 119 - RNA, 34 nt, Artificial
  Part of exon 10 of the human dystrophin transcript
cugcugaggacacauugcaagcacaaggagagau

SEQ ID NO: 120 - RNA, 34 nt, Artificial
  Part of exon 26 of the human dystrophin transcript
cuccagaugaauuacagaaagcaguugaagagau

SEQ ID NO: 121 - RNA, 16 nt, Artificial
  Part of exon 10 of the human dystrophin transcript
acagcuuuagaagaag

SEQ ID NO: 122 - RNA, 16 nt, Artificial
  Part of exon 27 of the human dystrophin transcript
agagcuaaagaagagg

SEQ ID NO: 123 - RNA, 75 nt, Artificial
  Part of exon 10 of the human dystrophin transcript
aaaccuggaccguuaucaaacagcuuuagaagaaguauuaucguggcuucuuucugcugaggacacauugcaagc

SEQ ID NO: 124 - RNA, 73 nt, Artificial
  Part of exon 28 of the human dystrophin transcript
auacuuggagaaagcaaacaaguggcuaaaugaaguagaauuuaaacuuaaaaccacugaaaacauuccuggc

SEQ ID NO: 125 - RNA, 23 nt, Artificial
  Part of exon 10 of the human dystrophin transcript
cuaaugauguggaaguggugaaa

SEQ ID NO: 126 - RNA, 24 nt, Artificial
  Part of exon 29 of the human dystrophin transcript
cuaaucaaugaggaacuugagaca

SEQ ID NO: 127 - RNA, 70 nt, Artificial
  Part of exon 10 of the human dystrophin transcript
gacaagucauuuggcaguucauugauggagagugaaguaaaccuggaccguuaucaaacagcuuuagaag

SEQ ID NO: 128 - RNA, 61 nt, Artificial
  Part of exon 30 of the human dystrophin transcript
gacaagcaguuggcagcuuauauugcagacaagguggacgcagcucaaaugccucaggaag

SEQ ID NO: 129 - RNA, 40 nt, Artificial
  Part of exon 10 of the human dystrophin transcript
gacaagucauuuggcaguucauugauggagagugaaguaa

SEQ ID NO: 130 - RNA, 37 nt, Artificial
  Part of exon 31 of the human dystrophin transcript
gacaagucaugagaucaguuuagaagaaaugaagaaa

SEQ ID NO: 131 - RNA, 81 nt, Artificial
  Part of exon 10 of the human dystrophin transcript
acaagucauuuggcaguucauugauggagagugaaguaaaccuggaccguuaucaaacagcuuuagaagaaguauuaucgu

SEQ ID NO: 132 - RNA, 86 nt, Artificial
  Part of exon 32 of the human dystrophin transcript
acaagaaaguaagaugauuuuagaugaagugaagaugcacuugccugcauuggaaacaaagaguguggaacaggaaguaguacagu

SEQ ID NO: 133 - RNA, 22 nt, Artificial
  Part of exon 10 of the human dystrophin transcript
ugauguggaaguggugaaagac

SEQ ID NO: 134 - RNA, 24 nt, Artificial
  Part of exon 33 of the human dystrophin transcript
ugaaguggaaauggugauaaagac

SEQ ID NO: 135 - RNA, 29 nt, Artificial
  Part of exon 10 of the human dystrophin transcript
cuaaugauguggaaguggugaaagaccag

SEQ ID NO: 136 - RNA, 30 nt, Artificial
  Part of exon 34 of the human dystrophin transcript
cuacagauauggaauugacaaagagaucag

SEQ ID NO: 137 - RNA, 20 nt, Artificial
  Part of exon 10 of the human dystrophin transcript
aaacagcuuuagaagaagua

SEQ ID NO: 138 - RNA, 22 nt, Artificial
  Part of exon 35 of the human dystrophin transcript
aaacaguuuugggcaagaagga

SEQ ID NO: 139 - RNA, 31 nt, Artificial
  Part of exon 10 of the human dystrophin transcript
aagcacaaggagagauuucuaaugaugugga

SEQ ID NO: 140 - RNA, 32 nt, Artificial
  Part of exon 36 of the human dystrophin transcript
aaacacauggaaacuuuugaccagaaugugga

SEQ ID NO: 141 - RNA, 14 nt, Artificial
  Part of exon 10 of the human dystrophin transcript
gaaguaaaccugga

SEQ ID NO: 142 - RNA, 14 nt, Artificial
  Part of exon 37 of the human dystrophin transcript
gaauuaagacugga

SEQ ID NO: 143 - RNA, 42 nt, Artificial; identical to SEQ ID NO: 115
  Part of exon 10 of the human dystrophin transcript

SEQ ID NO: 144 - RNA, 40 nt, Artificial
  Part of exon 38 of the human dystrophin transcript
ugaaggaauuggagcaguuuaacucagauauacaaaaauu

SEQ ID NO: 145 - RNA, 24 nt, Artificial
  Part of exon 10 of the human dystrophin transcript
auugauggagagugaaguaaaccu

SEQ ID NO: 146 - RNA, 24 nt, Artificial
  Part of exon 39 of the human dystrophin transcript
auuguugcaaagaggagacaacuu

SEQ ID NO: 147 - RNA, 57 nt, Artificial
  Part of exon 10 of the human dystrophin transcript
ugaggacacauugcaagcacaaggagagauuucuaaugauguggaaguggugaaaga

SEQ ID NO: 148 - RNA, 60 nt, Artificial
  Part of exon 40 of the human dystrophin transcript
ugaggucucaaagaagaaaaaaggcucuagaaauuucucaucagugguaucaguacaaga

SEQ ID NO: 149 - RNA, 46 nt, Artificial
  Part of exon 10 of the human dystrophin transcript
gcugaggacacauugcaagcacaaggagagauuucuaaugaugugg

SEQ ID NO: 150 - RNA, 47 nt, Artificial
  Part of exon 41 of the human dystrophin transcript
gcugaaugcagugcguaggcaagcugagggcuugucugaggaugggg

SEQ ID NO: 151 - RNA, 134 nt, Artificial
  Part of exon 10 of the human dystrophin transcript
cugaagacaagucauuuggcaguucauugauggagagugaaguaaaccuggaccguuaucaaacagcuuuagaagaaguauuaucguggcuucuuucugcugaggacacauugcaagcacaaggagagauuucu

SEQ ID NO: 152 - RNA, 138 nt, Artificial
  Part of exon 42 of the human dystrophin transcript
cugaagacaugccuuuggaaauuucuuaugugccuucuacuuauuugacugaaaucacucaugucucacaagcccuauuagaaguggaacaacuucucaaugcuccugaccucugugcuaaggacuuugaagaucucu

SEQ ID NO: 153 - RNA, 109 nt, Artificial
  Part of exon 10 of the human dystrophin transcript
cguuaucaaacagcuuuagaagaaguauuaucguggcuucuuucugcugaggacacauugcaagcacaaggagagauuucuaaugauguggaaguggugaaagaccagu

SEQ ID NO: 154 - RNA, 106 nt, Artificial
  Part of exon 44 of the human dystrophin transcript
cguuuucauuaugauauaaagauauuuaaucaguggcuaacagaagcugaacaguuucucagaaagacacaaauuccugagaauugggaacaugcuaaauacaaau

SEQ ID NO: 155 - RNA, 50 nt, Artificial
  Part of exon 10 of the human dystrophin transcript
aaguaaaccuggaccguuaucaaacagcuuuagaagaaguauuaucgugg

SEQ ID NO: 156 - RNA, 54 nt, Artificial
  Part of exon 46 of the human dystrophin transcript
aagaauaucuugucagaauuucaaagagauuuaaaugaauuuguuuuaugguug

SEQ ID NO: 157 - RNA, 19 nt, Artificial
  Part of exon 10 of the human dystrophin transcript
aagcuccugaagacaaguc

SEQ ID NO: 158 - RNA, 19 nt, Artificial
  Part of exon 47 of the human dystrophin transcript
aagcucaagcagacaaauc

SEQ ID NO: 159 - RNA, 33 nt, Artificial
  Part of exon 10 of the human dystrophin transcript
uggaagcuccugaagacaagucauuuggcaguu

SEQ ID NO: 160 - RNA, 31 nt, Artificial
  Part of exon 48 of the human dystrophin transcript
uugaagcucaaauaaaagaccuugggcagcu

SEQ ID NO: 161 - RNA, 53 nt, Artificial
  Part of exon 10 of the human dystrophin transcript
gagagugaaguaaaccuggaccguuaucaaacagcuuuagaagaaguauuauc

SEQ ID NO: 162 - RNA, 53 nt, Artificial
  Part of exon 49 of the human dystrophin transcript
gaaacugaaauagcaguucaagcuaaacaaccggauguggaagagauuuuguc

SEQ ID NO: 163 - RNA, 108 nt, Artificial
  Part of exon 10 of the human dystrophin transcript
uucauugauggagagugaaguaaaccuggaccguuaucaaacagcuuuagaagaaguauuaucguggcuucuuucugcugaggacacauugcaagcacaaggagagau

SEQ ID NO: 164 - RNA, 108 nt, Artificial
  Part of exon 51 of the human dystrophin transcript
uuccuugauguuggagguaccugcucuggcagauuucaaccgggcuuggacagaacuuaccgacuggcuuucucugcuugaucaaguuauaaaaucacagagggugau

SEQ ID NO: 165 - RNA, 45 nt, Artificial
  Part of exon 10 of the human dystrophin transcript
gagagauuucuaaugauguggaaguggugaaagaccaguuucaua

SEQ ID NO: 166 - RNA, 46 nt, Artificial
  Part of exon 53 of the human dystrophin transcript
gaaagaauucagaaucagugggaugaaguacaagaacaccuucaga

SEQ ID NO: 167 - RNA, 14 nt, Artificial
  Part of exon 10 of the human dystrophin transcript
cagcuuuagaagaa

SEQ ID NO: 168 - RNA, 14 nt, Artificial
  Part of exon 55 of the human dystrophin transcript
cugcuuuggaagaa

SEQ ID NO: 169 - RNA, 25 nt, Artificial
  Part of exon 10 of the human dystrophin transcript
cauuuggaagcuccugaagacaagu

SEQ ID NO: 170 - RNA, 25 nt, Artificial
  Part of exon 57 of the human dystrophin transcript
cauuuggaagccaguucugaccagu

SEQ ID NO: 171 - RNA, 18 nt, Artificial
  Part of exon 10 of the human dystrophin transcript
cuuucugcugaggacaca

SEQ ID NO: 172 - RNA, 18 nt, Artificial
  Part of exon 59 of the human dystrophin transcript
cugccuccugaggagaga

SEQ ID NO: 173 - RNA, 19 nt, Artificial
  Part of exon 10 of the human dystrophin transcript
cauuuggaagcuccugaag

SEQ ID NO: 174 - RNA, 19 nt, Artificial
  Part of exon 60 of the human dystrophin transcript
cagauggaagcuucugcag

SEQ ID NO: 175 - RNA, 92 nt, Artificial
  Part of exon 11 of the human dystrophin transcript
aucagaagaugaagaaacugaaguacaagagcagaugaaucuccuaaauucaagaugggaaugccucaggguagcuagcauggaaaaacaaa

SEQ ID NO: 176 - RNA, 99 nt, Artificial
  Part of exon 12 of the human dystrophin transcript
aucagaaacugaaagaguugaaugacuggcuaacaaaaacagaagaaagaacaaggaaaauggaggaagagccucuuggaccugaucuugaagaccuaa

SEQ ID NO: 177 - RNA, 55 nt, Artificial
  Part of exon 11 of the human dystrophin transcript
agaagaugaagaaacugaaguacaagagcagaugaaucuccuaaauucaagaugg

SEQ ID NO: 178 - RNA, 53 nt, Artificial
  Part of exon 13 of the human dystrophin transcript
agaagaucuagaacaagaacaagucagggucaauucucucacucacauggugg

SEQ ID NO: 179 - RNA, 31 nt, Artificial
  Part of exon 11 of the human dystrophin transcript
gaugaagaaacugaaguacaagagcagauga

SEQ ID NO: 180 - RNA, 31 nt, Artificial
  Part of exon 14 of the human dystrophin transcript
gaugggcaaacaucuguagauggacagaaga

SEQ ID NO: 181 - RNA, 90 nt, Artificial
  Part of exon 11 of the human dystrophin transcript
uaucagaagaugaagaaacugaaguacaagagcagaugaaucuccuaaauucaagaugggaaugccucaggguagcuagcauggaaaaac

SEQ ID NO: 182 - RNA, 84 nt, Artificial
  Part of exon 15 of the human dystrophin transcript
uuucagaaaaagaagaugcagugaacaagauucacacaacuggcuuuaaagaucaaaaugaaauguuaucaagucuucaaaaac

SEQ ID NO: 183 - RNA, 45 nt, Artificial
  Part of exon 11 of the human dystrophin transcript
aagaaacugaaguacaagagcagaugaaucuccuaaauucaagau

SEQ ID NO: 184 - RNA, 45 nt, Artificial
  Part of exon 16 of the human dystrophin transcript
aagaaaaagcaauccaugggcaaacuguauucacucaaacaagau

SEQ ID NO: 185 - RNA, 26 nt, Artificial
  Part of exon 11 of the human dystrophin transcript
aggaaaauuaucagaagaugaagaaa

SEQ ID NO: 186 - RNA, 26 nt, Artificial
  Part of exon 18 of the human dystrophin transcript
aggcaacuucucagacuuaaaagaaa

SEQ ID NO: 187 - RNA, 62 nt, Artificial
  Part of exon 11 of the human dystrophin transcript
cggguugguaauauucuacaauugggaaguaagcugauuggaacaggaaaauuaucagaaga

SEQ ID NO: 188 - RNA, 62 nt, Artificial
  Part of exon 20 of the human dystrophin transcript
ccgguggaucgaauucugccaguugcuaagugagagacuuaacuggcuggaguaucagaaca

SEQ ID NO: 189 - RNA, 16 nt, Artificial
  Part of exon 11 of the human dystrophin transcript
ccaucagggccggguu

SEQ ID NO: 190 - RNA, 16 nt, Artificial
  Part of exon 22 of the human dystrophin transcript
ccaucaggacaugggu

SEQ ID NO: 191 - RNA, 65 nt, Artificial
  Part of exon 11 of the human dystrophin transcript
cugauuggaacaggaaaauuaucagaagaugaagaaacugaaguacaagagcagaugaaucuccu

SEQ ID NO: 192 - RNA, 66 nt, Artificial
  Part of exon 23 of the human dystrophin transcript
cugaaauuagccggaaauaucaaucagaauuugaagaaauugagggacgcuggaagaagcucuccu

SEQ ID NO: 193 - RNA, 34 nt, Artificial
  Part of exon 11 of the human dystrophin transcript
gaugaagaaacugaaguacaagagcagaugaauc

SEQ ID NO: 194 - RNA, 31 nt, Artificial
  Part of exon 24 of the human dystrophin transcript
gauucagaaauucuaaaaaagcagcugaaac

SEQ ID NO: 195 - RNA, 77 nt, Artificial
  Part of exon 11 of the human dystrophin transcript
guugguaauauucuacaauugggaaguaagcugauuggaacaggaaaauuaucagaagaugaagaaacugaaguaca

SEQ ID NO: 196 - RNA, 77 nt, Artificial
  Part of exon 25 of the human dystrophin transcript
gucagugauauucagacaauucagcccagucuaaacagugucaaugaaggugggcagaagauaaagaaugaagcaga

SEQ ID NO: 197 - RNA, 49 nt, Artificial
  Part of exon 11 of the human dystrophin transcript
caggaaaauuaucagaagaugaagaaacugaaguacaagagcagaugaa

SEQ ID NO: 198 - RNA, 48 nt, Artificial
  Part of exon 26 of the human dystrophin transcript
cagaaagaucuaucagagaugcacgaauggaugacacaagcugaagaa

SEQ ID NO: 199 - RNA, 44 nt, Artificial
  Part of exon 11 of the human dystrophin transcript
aagaugaagaaacugaaguacaagagcagaugaaucuccuaaau

SEQ ID NO: 200 - RNA, 44 nt, Artificial
  Part of exon 27 of the human dystrophin transcript
aagaagaggcccaacaaaaagaagcgaaagugaaacuccuuacu

SEQ ID NO: 201 - RNA, 26 nt, Artificial
  Part of exon 11 of the human dystrophin transcript
gaagaugaagaaacugaaguacaaga

SEQ ID NO: 202 - RNA, 29 nt, Artificial
  Part of exon 28 of the human dystrophin transcript
ggagcugaggaaaucucugaggugcuaga

SEQ ID NO: 203 - RNA, 74 nt, Artificial
  Part of exon 11 of the human dystrophin transcript
gcugauuggaacaggaaaauuaucagaagaugaagaaacugaaguacaagagcagaugaaucuccuaaauucaa

SEQ ID NO: 204 - RNA, 73 nt, Artificial
  Part of exon 29 of the human dystrophin transcript
gcauauuggcacagacccuaacagauggcggagucauggaugagcuaaucaaugaggaacuugagacauuuaa

SEQ ID NO: 205 - RNA, 62 nt, Artificial
  Part of exon 11 of the human dystrophin transcript
aagcugauuggaacaggaaaauuaucagaagaugaagaaacugaaguacaagagcagaugaa

SEQ ID NO: 206 - RNA, 61 nt, Artificial
  Part of exon 31 of the human dystrophin transcript
aaucugauuugacaagucaugagaucaguuuagaagaaaugaagaaacauaaucaggggaa

SEQ ID NO: 207 - RNA, 29 nt, Artificial
  Part of exon 11 of the human dystrophin transcript
auugggaaguaagcugauuggaacaggaa

SEQ ID NO: 208 - RNA, 28 nt, Artificial
  Part of exon 32 of the human dystrophin transcript
auuggaaacaaagaguguggaacaggaa

SEQ ID NO: 209 - RNA, 45 nt, Artificial
  Part of exon 11 of the human dystrophin transcript
aaaauuaucagaagaugaagaaacugaaguacaagagcagaugaa

SEQ ID NO: 210 - RNA, 44 nt, Artificial
  Part of exon 33 of the human dystrophin transcript
aaaagucugagugaagugaagucugaaguggaaauggugauaaa

SEQ ID NO: 211 - RNA, 32 nt, Artificial
  Part of exon 11 of the human dystrophin transcript
uggaacaggaaaauuaucagaagaugaagaaa

SEQ ID NO: 212 - RNA, 33 nt, Artificial
  Part of exon 34 of the human dystrophin transcript
uggaauugacaaagagaucagcaguugaaggaa

SEQ ID NO: 213 - RNA, 17 nt, Artificial
  Part of exon 11 of the human dystrophin transcript
agaugaagaaacugaag

SEQ ID NO: 214 - RNA, 17 nt, Artificial
  Part of exon 35 of the human dystrophin transcript
agauugagaaacagaag

SEQ ID NO: 215 - RNA, 37 nt, Artificial
  Part of exon 11 of the human dystrophin transcript
aucagaagaugaagaaacugaaguacaagagcagaug

SEQ ID NO: 216 - RNA, 35 nt, Artificial
  Part of exon 36 of the human dystrophin transcript
aucagagaaaaagaaaccccagcaaaaagaagacg

SEQ ID NO: 217 - RNA, 15 nt, Artificial
  Part of exon 11 of the human dystrophin transcript
auggauuugacagcc

SEQ ID NO: 218 - RNA, 14 nt, Artificial
  Part of exon 37 of the human dystrophin transcript
aucgauuugcagcc

SEQ ID NO: 219 - RNA, 48 nt, Artificial
  Part of exon 11 of the human dystrophin transcript
aaaauuaucagaagaugaagaaacugaaguacaagagcagaugaaucu

SEQ ID NO: 220 - RNA, 48 nt, Artificial
  Part of exon 38 of the human dystrophin transcript
aaaauugcuugaaccacuggaggcugaaauucagcagggggugaaucu

SEQ ID NO: 221 - RNA, 34 nt, Artificial
  Part of exon 11 of the human dystrophin transcript
agaagaugaagaaacugaaguacaagagcagaug

SEQ ID NO: 222 - RNA, 36 nt, Artificial
  Part of exon 39 of the human dystrophin transcript
agaaagcgagaggaaauaaagauaaaacagcagcug

SEQ ID NO: 223 - RNA, 29 nt, Artificial
  Part of exon 11 of the human dystrophin transcript
aguacaagagcagaugaaucuccuaaauu

SEQ ID NO: 224 - RNA, 33 nt, Artificial
  Part of exon 40 of the human dystrophin transcript
aguacaagaggcaggcugaugaucuccugaaau

SEQ ID NO: 225 - RNA, 47 nt, Artificial
  Part of exon 11 of the human dystrophin transcript
gaaaauuaucagaagaugaagaaacugaaguacaagagcagaugaau

SEQ ID NO: 226 - RNA, 42 nt, Artificial
  Part of exon 41 of the human dystrophin transcript
gaaauugaucgggaauugcagaagaagaaagaggagcugaau

SEQ ID NO: 227 - RNA, 17 nt, Artificial
  Part of exon 11 of the human dystrophin transcript
uaucagaagaugaagaa

SEQ ID NO: 228 - RNA, 17 nt, Artificial
  Part of exon 42 of the human dystrophin transcript
uauuagaaguggaacaa

SEQ ID NO: 229 - RNA, 68 nt, Artificial
  Part of exon 11 of the human dystrophin transcript
acaagagcagaugaaucuccuaaauucaagaugggaaugccucaggguagcuagcauggaaaaacaaa

SEQ ID NO: 230 - RNA, 66 nt, Artificial
  Part of exon 44 of the human dystrophin transcript
acagaagcugaacaguuucucagaaagacacaaauuccugagaauugggaacaugcuaaauacaaa

SEQ ID NO: 231 - RNA, 34 nt, Artificial
  Part of exon 11 of the human dystrophin transcript
gaaguacaagagcagaugaaucuccuaaauucaa

SEQ ID NO: 232 - RNA, 33 nt, Artificial
  Part of exon 46 of the human dystrophin transcript
gaagaacaaaagaauaucuugucagaauuucaa

SEQ ID NO: 233 - RNA, 42 nt, Artificial
  Part of exon 11 of the human dystrophin transcript
cagaagaugaagaaacugaaguacaagagcagaugaaucucc

SEQ ID NO: 234 - RNA, 48 nt, Artificial
  Part of exon 47 of the human dystrophin transcript
cagaagagcaagauaaacuugaaaauaagcucaagcagacaaaucucc

SEQ ID NO: 235 - RNA, 40 nt, Artificial
  Part of exon 11 of the human dystrophin transcript
aacugaaguacaagagcagaugaaucuccuaaauucaaga

SEQ ID NO: 236 - RNA, 39 nt, Artificial
  Part of exon 48 of the human dystrophin transcript
accugagaaacaaggagaaauugaagcucaaauaaaaga

SEQ ID NO: 237 - RNA, 45 nt, Artificial
  Part of exon 11 of the human dystrophin transcript
ggaacaggaaaauuaucagaagaugaagaaacugaaguacaagag

SEQ ID NO: 238 - RNA, 45 nt, Artificial
  Part of exon 49 of the human dystrophin transcript
gaaacugaaauagcaguucaagcuaaacaaccggauguggaagag

SEQ ID NO: 239 - RNA, 31 nt, Artificial
  Part of exon 11 of the human dystrophin transcript
augaaucuccuaaauucaagaugggaaugcc

SEQ ID NO: 240 - RNA, 31 nt, Artificial
  Part of exon 51 of the human dystrophin transcript
aggaaacugccaucuccaaacuagaaaugcc

SEQ ID NO: 241 - RNA, 40 nt, Artificial
  Part of exon 11 of the human dystrophin transcript
gaaaauuaucagaagaugaagaaacugaaguacaagagca

SEQ ID NO: 242 - RNA, 38 nt, Artificial
  Part of exon 53 of the human dystrophin transcript
gaaagaauucagaaucagugggaugaaguacaagaaca

SEQ ID NO: 243 - RNA, 35 nt, Artificial
  Part of exon 11 of the human dystrophin transcript
agaugaagaaacugaaguacaagagcagaugaauc

SEQ ID NO: 244 - RNA, 35 nt, Artificial
  Part of exon 55 of the human dystrophin transcript
agaagacuccaagggaguaaaagagcugaugaaac

SEQ ID NO: 245 - RNA, 56 nt, Artificial
  Part of exon 11 of the human dystrophin transcript
ggaaguaagcugauuggaacaggaaaauuaucagaagaugaagaaacugaaguaca

SEQ ID NO: 246 - RNA, 55 nt, Artificial
  Part of exon 57 of the human dystrophin transcript
ggcaggcaccuauuggaggcgacuuuccagcaguucagaagcagaacgauguaca

SEQ ID NO: 247 - RNA, 138 nt, Artificial
  Part of exon 11 of the human dystrophin transcript
ucagggccggguugguaauauucuacaauugggaaguaagcugauuggaacaggaaaauuaucagaagaugaagaaacugaaguacaagagcagaugaaucuccuaaauucaagaugggaaugccucaggguagcuag

SEQ ID NO: 248 - RNA, 140 nt, Artificial
  Part of exon 59 of the human dystrophin transcript
ucaauacugagugggaaaaauugaaccugcacuccgcugacuggcagagaaaaauagaugagacccuugaaagacuccaggaacuucaagaggccacggaugagcuggaccucaagcugcgccaagcugaggugaucaag

SEQ ID NO: 249 - RNA, 18 nt, Artificial
  Part of exon 11 of the human dystrophin transcript
ccuaaauucaagauggga

SEQ ID NO: 250 - RNA, 18 nt, Artificial
  Part of exon 60 of the human dystrophin transcript
ccugaacaccagauggaa

SEQ ID NO: 251 - RNA, 18 nt, Artificial
  Part of exon 12 of the human dystrophin transcript
acauagaguuuuaaugga

SEQ ID NO: 252 - RNA, 18 nt, Artificial
  Part of exon 17 of the human dystrophin transcript
acagacaacuguaaugga

SEQ ID NO: 253 - RNA, 28 nt, Artificial
  Part of exon 12 of the human dystrophin transcript
gcuaacaaaaacagaagaaagaacaagg

SEQ ID NO: 254 - RNA, 29 nt, Artificial
  Part of exon 43 of the human dystrophin transcript
guuaacaaaauguacaaggaccgacaagg

SEQ ID NO: 255 - RNA, 36 nt, Artificial
  Part of exon 12 of the human dystrophin transcript
caaaaacagaagaaagaacaaggaaaauggaggaag

SEQ ID NO: 256 - RNA, 40 nt, Artificial
  Part of exon 45 of the human dystrophin transcript
caaaaacagaugccaguauucuacaggaaaaauugggaag

SEQ ID NO: 257 - RNA, 32 nt, Artificial
  Part of exon 12 of the human dystrophin transcript
uuacauagaguuuuaauggaucuccagaauca

SEQ ID NO: 258 - RNA, 33 nt, Artificial
  Part of exon 54 of the human dystrophin transcript
uaacagagaauaucaaugccucuuggagaagca

SEQ ID NO: 259 - RNA, 62 nt, Artificial
  Part of exon 12 of the human dystrophin transcript
gaucuccagaaucagaaacugaaagaguugaaugacuggcuaacaaaaacagaagaaagaac

SEQ ID NO: 260 - RNA, 69 nt, Artificial
  Part of exon 56 of the human dystrophin transcript
gaccuccaaggugaaauugaagcucacacagauguuuaucacaaccuggaugaaaacagccaaaaaauc

SEQ ID NO: 261 - RNA, 28 nt, Artificial
  Part of exon 13 of the human dystrophin transcript
ucacgcaacugcugcuuuggaagaacaa

SEQ ID NO: 262 - RNA, 25 nt, Artificial
  Part of exon 15 of the human dystrophin transcript
ucacacaacuggcuuuaaagaucaa

SEQ ID NO: 263 - RNA, 24 nt, Artificial
  Part of exon 13 of the human dystrophin transcript
aagaagaucuagaacaagaacaag

SEQ ID NO: 264 - RNA, 23 nt, Artificial
  Part of exon 16 of the human dystrophin transcript
aagcggaucuagaaaagaaaaag

SEQ ID NO: 265 - RNA, 46 nt, Artificial
  Part of exon 13 of the human dystrophin transcript
aaucuaguggagaucacgcaacugcugcuuuggaagaacaacuuaa

SEQ ID NO: 266 - RNA, 48 nt, Artificial
  Part of exon 18 of the human dystrophin transcript
aaucuuucggaaggaaggcaacuucucagacuuaaaagaaaaagucaa

SEQ ID NO: 267 - RNA, 28 nt, Artificial
  Part of exon 13 of the human dystrophin transcript
aucuaguggagaucacgcaacugcugcu

SEQ ID NO: 268 - RNA, 29 nt, Artificial
  Part of exon 20 of the human dystrophin transcript
aacaauuggagcagaugacaacuacugcu

SEQ ID NO: 269 - RNA, 19 nt, Artificial
  Part of exon 13 of the human dystrophin transcript
agucagggucaauucucuc

SEQ ID NO: 270 - RNA, 19 nt, Artificial
  Part of exon 22 of the human dystrophin transcript
agucagaaaccaaacucuc

SEQ ID NO: 271 - RNA, 48 nt, Artificial
  Part of exon 13 of the human dystrophin transcript
gcuucaagaagaucuagaacaagaacaagucagggucaauucucucac

SEQ ID NO: 272 - RNA, 48 nt, Artificial
  Part of exon 23 of the human dystrophin transcript
gcuuuacaaaguucucugcaagagcaacaaaguggccuauacuaucuc

SEQ ID NO: 273 - RNA, 21 nt, Artificial
  Part of exon 13 of the human dystrophin transcript
acaugguggugguaguugaug

SEQ ID NO: 274 - RNA, 22 nt, Artificial
  Part of exon 24 of the human dystrophin transcript
aaauggauggcugaaguugaug

SEQ ID NO: 275 - RNA, 30 nt, Artificial
  Part of exon 13 of the human dystrophin transcript
agaagaucuagaacaagaacaagucagggu

SEQ ID NO: 276 - RNA, 30 nt, Artificial
  Part of exon 25 of the human dystrophin transcript
agaagauaaagaaugaagcagagccagagu

SEQ ID NO: 277 - RNA, 15 nt, Artificial
  Part of exon 13 of the human dystrophin transcript
cuucaagaagaucua

SEQ ID NO: 278 - RNA, 15 nt, Artificial
  Part of exon 26 of the human dystrophin transcript
cuccagaaagaucua

SEQ ID NO: 279 - RNA, 48 nt, Artificial
  Part of exon 13 of the human dystrophin transcript
ucaagaagaucuagaacaagaacaagucagggucaauucucucacuca

SEQ ID NO: 280 - RNA, 48 nt, Artificial
  Part of exon 27 of the human dystrophin transcript
uaaagaagaggcccaacaaaaagaagcgaaagugaaacuccuuacuga

SEQ ID NO: 281 - RNA, 66 nt, Artificial
  Part of exon 13 of the human dystrophin transcript
caugguggugguaguugaugaaucuaguggagaucacgcaacugcugcuuuggaagaacaacuuaa

SEQ ID NO: 282 - RNA, 67 nt, Artificial
  Part of exon 28 of the human dystrophin transcript
cauguuggcaugaguuauugucauacuuggagaaagcaaacaaguggcuaaaugaaguagaauuuaa

SEQ ID NO: 283 - RNA, 21 nt, Artificial
  Part of exon 13 of the human dystrophin transcript
caugguggugguaguugauga

SEQ ID NO: 284 - RNA, 21 nt, Artificial
  Part of exon 29 of the human dystrophin transcript
cauggaugagcuaaucaauga

SEQ ID NO: 285 - RNA, 50 nt, Artificial
  Part of exon 13 of the human dystrophin transcript
ucacucacaugguggugguaguugaugaaucuaguggagaucacgcaacu

SEQ ID NO: 286 - RNA, 50 nt, Artificial
  Part of exon 30 of the human dystrophin transcript
ucauugacaagcaguuggcagcuuauauugcagacaagguggacgcagcu

SEQ ID NO: 287 - RNA, 29 nt, Artificial
  Part of exon 13 of the human dystrophin transcript
agaagaucuagaacaagaacaagucaggg

SEQ ID NO: 288 - RNA, 27 nt, Artificial
  Part of exon 31 of the human dystrophin transcript
agaagaaaugaagaaacauaaucaggg

SEQ ID NO: 289 - RNA, 39 nt, Artificial
  Part of exon 13 of the human dystrophin transcript
gaugaaucuaguggagaucacgcaacugcugcuuuggaa

SEQ ID NO: 290 - RNA, 43 nt, Artificial
  Part of exon 32 of the human dystrophin transcript
gaugauuuuagaugaagugaagaugcacuugccugcauuggaa

SEQ ID NO: 291 - RNA, 18 nt, Artificial
  Part of exon 13 of the human dystrophin transcript
gcaacugcugcuuuggaa

SEQ ID NO: 292 - RNA, 18 nt, Artificial
  Part of exon 34 of the human dystrophin transcript
gcagcuacagauauggaa

SEQ ID NO: 293 - RNA, 113 nt, Artificial
  Part of exon 13 of the human dystrophin transcript
ucaagaagaucuagaacaagaacaagucagggucaauucucucacucacaugguggugguaguugaugaaucuaguggagaucacgcaacugcugcuuuggaagaacaacuua

SEQ ID NO: 294 - RNA, 110 nt, Artificial
  Part of exon 35 of the human dystrophin transcript
ucaaaaagagauugagaaacagaaggugcaccugaagaguaucacagagguaggagaggccuugaaaacaguuuugggcaagaaggagacguugguggaagauaaacuca

SEQ ID NO: 295 - RNA, 53 nt, Artificial
  Part of exon 13 of the human dystrophin transcript
uugaugaaucuaguggagaucacgcaacugcugcuuuggaagaacaacuuaag

SEQ ID NO: 296 - RNA, 50 nt, Artificial
  Part of exon 36 of the human dystrophin transcript
uggaugaaucagagaaaaagaaaccccagcaaaaagaagacgugcuuaag

SEQ ID NO: 297 - RNA, 23 nt, Artificial
  Part of exon 13 of the human dystrophin transcript
gaaucuaguggagaucacgcaac

SEQ ID NO: 298 - RNA, 23 nt, Artificial
  Part of exon 37 of the human dystrophin transcript
gacucuacacgugaccaagcagc

SEQ ID NO: 299 - RNA, 21 nt, Artificial
  Part of exon 13 of the human dystrophin transcript
aucuagaacaagaacaaguca

SEQ ID NO: 300 - RNA, 21 nt, Artificial
  Part of exon 38 of the human dystrophin transcript
aucugaaagaggaagacuuca

SEQ ID NO: 301 - RNA, 50 nt, Artificial
  Part of exon 13 of the human dystrophin transcript
gaugaaucuaguggagaucacgcaacugcugcuuuggaagaacaacuuaa

SEQ ID NO: 302 - RNA, 54 nt, Artificial
  Part of exon 39 of the human dystrophin transcript
gagaaagcgagaggaaauaaagauaaaacagcagcuguuacagacaaaacauaa

SEQ ID NO: 303 - RNA, 88 nt, Artificial
  Part of exon 13 of the human dystrophin transcript
agaucuagaacaagaacaagucagggucaauucucucacucacaugguggugguaguugaugaaucuaguggagaucacgcaacugcu

SEQ ID NO: 304 - RNA, 85 nt, Artificial
  Part of exon 40 of the human dystrophin transcript
aggucucaaagaagaaaaaaggcucuagaaauuucucaucagugguaucaguacaagaggcaggcugaugaucuccugaaaugcu

SEQ ID NO: 305 - RNA, 31 nt, Artificial
  Part of exon 13 of the human dystrophin transcript
aguggagaucacgcaacugcugcuuuggaag

SEQ ID NO: 306 - RNA, 31 nt, Artificial
  Part of exon 41 of the human dystrophin transcript
aguggagccaacucagauccagcucagcaag

SEQ ID NO: 307 - RNA, 40 nt, Artificial
  Part of exon 13 of the human dystrophin transcript
ugaugaaucuaguggagaucacgcaacugcugcuuuggaa

SEQ ID NO: 308 - RNA, 43 nt, Artificial
  Part of exon 42 of the human dystrophin transcript
ugaagaaacgaugauggugaugacugaagacaugccuuuggaa

SEQ ID NO: 309 - RNA, 52 nt, Artificial
  Part of exon 13 of the human dystrophin transcript
aguugaugaaucuaguggagaucacgcaacugcugcuuuggaagaacaacuu

SEQ ID NO: 310 - RNA, 56 nt, Artificial
  Part of exon 44 of the human dystrophin transcript
agauauuuaaucaguggcuaacagaagcugaacaguuucucagaaagacacaaauu

SEQ ID NO: 311 - RNA, 22 nt, Artificial
  Part of exon 13 of the human dystrophin transcript
cuucaagaagaucuagaacaag

SEQ ID NO: 312 - RNA, 22 nt, Artificial
  Part of exon 46 of the human dystrophin transcript
cuaaaagaaaagcuugagcaag

SEQ ID NO: 313 - RNA, 32 nt, Artificial
  Part of exon 13 of the human dystrophin transcript
gugcuucaagaagaucuagaacaagaacaagu

SEQ ID NO: 314 - RNA, 34 nt, Artificial
  Part of exon 47 of the human dystrophin transcript
gugcucccauaagcccagaagagcaagauaaacu

SEQ ID NO: 315 - RNA, 28 nt, Artificial
  Part of exon 13 of the human dystrophin transcript
aguggagaucacgcaacugcugcuuugg

SEQ ID NO: 316 - RNA, 28 nt, Artificial
  Part of exon 48 of the human dystrophin transcript
agagcaguuaaaucaucugcugcugugg

SEQ ID NO: 317 - RNA, 19 nt, Artificial
  Part of exon 13 of the human dystrophin transcript
uagaacaagaacaagucag

SEQ ID NO: 318 - RNA, 19 nt, Artificial
  Part of exon 49 of the human dystrophin transcript
uuguacaaggaaaaaccag

SEQ ID NO: 319 - RNA, 76 nt, Artificial
  Part of exon 13 of the human dystrophin transcript
ggucaauucucucacucacaugguggugguaguugaugaaucuaguggagaucacgcaacugcugcuuuggaagaa

SEQ ID NO: 320 - RNA, 74 nt, Artificial
  Part of exon 51 of the human dystrophin transcript
gaucaaguuauaaaaucacagagggugauggugggugaccuugaggauaucaacgagaugaucaucaagcagaa

SEQ ID NO: 321 - RNA, 17 nt, Artificial
  Part of exon 13 of the human dystrophin transcript
gaucuagaacaagaaca

SEQ ID NO: 322 - RNA, 17 nt, Artificial
  Part of exon 53 of the human dystrophin transcript
gaugaaguacaagaaca

SEQ ID NO: 323 - RNA, 15 nt, Artificial
  Part of exon 13 or 55 of the human dystrophin transcript
gcugcuuuggaagaa

SEQ ID NO: 324 - RNA, 26 nt, Artificial
  Part of exon 13 of the human dystrophin transcript
uucaagaagaucuagaacaagaacaa

SEQ ID NO: 325 - RNA, 25 nt, Artificial
  Part of exon 57 of the human dystrophin transcript
uuccagcaguucagaagcagaacga

SEQ ID NO: 326 - RNA, 39 nt, Artificial
  Part of exon 13 of the human dystrophin transcript
ggagaucacgcaacugcugcuuuggaagaacaacuuaag

SEQ ID NO: 327 - RNA, 39 nt, Artificial
  Part of exon 59 of the human dystrophin transcript
ggcgaucuccucauugacucucuccaagaucaccucgag

SEQ ID NO: 328 - RNA, 30 nt, Artificial
  Part of exon 13 of the human dystrophin transcript
gcaacugcugcuuuggaagaacaacuuaag

SEQ ID NO: 329 - RNA, 29 nt, Artificial
  Part of exon 60 of the human dystrophin transcript
gaaauugcgccucugaaagagaacgugag

SEQ ID NO: 330 - RNA, 18 nt, Artificial
  Part of exon 14 of the human dystrophin transcript
acgucuuacugaagaaca

SEQ ID NO: 331 - RNA, 18 nt, Artificial
  Part of exon 15 of the human dystrophin transcript
auggcuuucagaaaaaga

SEQ ID NO: 332 - RNA, 14 nt, Artificial
  Part of exon 14 of the human dystrophin transcript
aucgaugggcaaac

SEQ ID NO: 333 - RNA, 14 nt, Artificial
  Part of exon 16 of the human dystrophin transcript
auccaugggcaaac

SEQ ID NO: 334 - RNA, 29 nt, Artificial
  Part of exon 14 of the human dystrophin transcript
uucucaaauggcaacgucuuacugaagaa

SEQ ID NO: 335 - RNA, 27 nt, Artificial
  Part of exon 18 of the human dystrophin transcript
uccugaauuugcaaucuuucggaagga

SEQ ID NO: 336 - RNA, 24 nt, Artificial
  Part of exon 14 of the human dystrophin transcript
caaauggcaacgucuuacugaaga

SEQ ID NO: 337 - RNA, 23 nt, Artificial
  Part of exon 20 of the human dystrophin transcript
cagaugacaacuacugcugaaaa

SEQ ID NO: 338 - RNA, 35 nt, Artificial
  Part of exon 14 of the human dystrophin transcript
uauugggagaucgaugggcaaacaucuguagaugg

SEQ ID NO: 339 - RNA, 33 nt, Artificial
  Part of exon 22 of the human dystrophin transcript
uaucaggagaccaugagugccaucaggacaugg

SEQ ID NO: 340 - RNA, 29 nt, Artificial
  Part of exon 14 of the human dystrophin transcript
uuuacaagacauccuucucaaauggcaac

SEQ ID NO: 341 - RNA, 26 nt, Artificial
  Part of exon 23 of the human dystrophin transcript
uuuacaaaguucucugcaagagcaac

SEQ ID NO: 342 - RNA, 38 nt, Artificial
  Part of exon 14 of the human dystrophin transcript
aagacauccuucucaaauggcaacgucuuacugaagaa

SEQ ID NO: 343 - RNA, 38 nt, Artificial
  Part of exon 24 of the human dystrophin transcript
aagaaauggauggcugaaguugauguuuuucugaagga

SEQ ID NO: 344 - RNA, 17 nt, Artificial
  Part of exon 14 of the human dystrophin transcript
uguagauggacagaaga

SEQ ID NO: 345 - RNA, 17 nt, Artificial
  Part of exon 25 of the human dystrophin transcript
ugaaggugggcagaaga

SEQ ID NO: 346 - RNA, 20 nt, Artificial
  Part of exon 14 of the human dystrophin transcript
aaauggcaacgucuuacuga

SEQ ID NO: 347 - RNA, 20 nt, Artificial
  Part of exon 27 of the human dystrophin transcript
aaagugaaacuccuuacuga

SEQ ID NO: 348 - RNA, 19 nt, Artificial
  Part of exon 14 of the human dystrophin transcript
gcaaacaucuguagaugga

SEQ ID NO: 349 - RNA, 21 nt, Artificial
  Part of exon 28 of the human dystrophin transcript
gcaaacaaguggcuaaaugaa

SEQ ID NO: 350 - RNA, 13 nt, Artificial
  Part of exon 14 of the human dystrophin transcript
aucgaugggcaaa

SEQ ID NO: 351 - RNA, 13 nt, Artificial
  Part of exon 29 of the human dystrophin transcript
auggaugagcuaa

SEQ ID NO: 352 - RNA, 27 nt, Artificial
  Part of exon 14 of the human dystrophin transcript
cagaagaccgcuggguucuuuuacaag

SEQ ID NO: 353 - RNA, 27 nt, Artificial
  Part of exon 30 of the human dystrophin transcript
caggagucccucacauucauugacaag

SEQ ID NO: 354 - RNA, 13 nt, Artificial
  Part of exon 14 of the human dystrophin transcript
uuuuacaagacau

SEQ ID NO: 355 - RNA, 13 nt, Artificial
  Part of exon 31 of the human dystrophin transcript
uuugacaagucau

SEQ ID NO: 356 - RNA, 17 nt, Artificial
  Part of exon 14 of the human dystrophin transcript
uguagauggacagaaga

SEQ ID NO: 357 - RNA, 17 nt, Artificial
  Part of exon 32 of the human dystrophin transcript
uuuagaugaagugaaga

SEQ ID NO: 358 - RNA, 15 nt, Artificial
  Part of exon 14 of the human dystrophin transcript
aacgucuuacugaag

SEQ ID NO: 359 - RNA, 15 nt, Artificial
  Part of exon 33 of the human dystrophin transcript
aaagucugagugaag

SEQ ID NO: 360 - RNA, 21 nt, Artificial
  Part of exon 14 of the human dystrophin transcript
aaauggcaacgucuuacugaa

SEQ ID NO: 361 - RNA, 20 nt, Artificial
  Part of exon 34 of the human dystrophin transcript
aaaugaaugucuugacagaa

SEQ ID NO: 362 - RNA, 22 nt, Artificial
  Part of exon 14 of the human dystrophin transcript
cagaagaccgcuggguucuuuu

SEQ ID NO: 363 - RNA, 22 nt, Artificial
  Part of exon 35 of the human dystrophin transcript
cagaagagugguuaaaucuuuu

SEQ ID NO: 364 - RNA, 18 nt, Artificial
  Part of exon 14 of the human dystrophin transcript
caaauggcaacgucuuac

SEQ ID NO: 365 - RNA, 18 nt, Artificial
  Part of exon 36 of the human dystrophin transcript
cacauggaaacuuuugac

SEQ ID NO: 366 - RNA, 37 nt, Artificial
  Part of exon 14 of the human dystrophin transcript
aucgaugggcaaacaucuguagauggacagaagaccg

SEQ ID NO: 367 - RNA, 36 nt, Artificial
  Part of exon 37 of the human dystrophin transcript
aucgauuugcagccauuucacacagaauuaagacug

SEQ ID NO: 368 - RNA, 27 nt, Artificial
  Part of exon 14 of the human dystrophin transcript
ucucaaauggcaacgucuuacugaaga

SEQ ID NO: 369 - RNA, 27 nt, Artificial
  Part of exon 38 of the human dystrophin transcript
ucugaaagaggaagacuucaauaaaga

SEQ ID NO: 370 - RNA, 53 nt, Artificial
  Part of exon 14 of the human dystrophin transcript
gaagaccgcuggguucuuuuacaagacauccuucucaaauggcaacgucuuac

SEQ ID NO: 371 - RNA, 52 nt, Artificial
  Part of exon 39 of the human dystrophin transcript
gaagacaaugaggguacuguaaaagaauuguugcaaagaggagacaacuuac

SEQ ID NO: 372 - RNA, 18 nt, Artificial
  Part of exon 14 of the human dystrophin transcript
acgucuuacugaagaaca

SEQ ID NO: 373 - RNA, 18 nt, Artificial
  Part of exon 40 of the human dystrophin transcript
aggucucaaagaagaaaa

SEQ ID NO: 374 - RNA, 18 nt, Artificial
  Part of exon 14 of the human dystrophin transcript
gggagaucgaugggcaaa

SEQ ID NO: 375 - RNA, 17 nt, Artificial
  Part of exon 41 of the human dystrophin transcript
gggaaauugagagcaaa

SEQ ID NO: 376 - RNA, 18 nt, Artificial
  Part of exon 14 of the human dystrophin transcript
aagacauccuucucaaau

SEQ ID NO: 377 - RNA, 19 nt, Artificial
  Part of exon 42 of the human dystrophin transcript
aagacaugccuuuggaaau

SEQ ID NO: 378 - RNA, 23 nt, Artificial
  Part of exon 14 of the human dystrophin transcript
aaauggcaacgucuuacugaaga

SEQ ID NO: 379 - RNA, 23 nt, Artificial
  Part of exon 44 of the human dystrophin transcript
aaauggcggcguuuucauuauga

SEQ ID NO: 380 - RNA, 15 nt, Artificial
  Part of exon 14 of the human dystrophin transcript
uagauggacagaaga

SEQ ID NO: 381 - RNA, 15 nt, Artificial
  Part of exon 46 of the human dystrophin transcript
uagaagaacaaaaga

SEQ ID NO: 382 - RNA, 30 nt, Artificial
  Part of exon 14 of the human dystrophin transcript
uucucaaauggcaacgucuuacugaagaac

SEQ ID NO: 383 - RNA, 30 nt, Artificial
  Part of exon 47 of the human dystrophin transcript
uucucaaacaauuaaaugaaacuggaggac

SEQ ID NO: 384 - RNA, 36 nt, Artificial
  Part of exon 14 of the human dystrophin transcript
auugggagaucgaugggcaaacaucuguagauggac

SEQ ID NO: 385 - RNA, 36 nt, Artificial
  Part of exon 48 of the human dystrophin transcript
aguuggaaauuuauaaccaaccaaaccaagaaggac

SEQ ID NO: 386 - RNA, 27 nt, Artificial
  Part of exon 14 of the human dystrophin transcript
augggcaaacaucuguagauggacaga

SEQ ID NO: 387 - RNA, 26 nt, Artificial
  Part of exon 49 of the human dystrophin transcript
aagggcagcauuuguacaaggaaaaa

SEQ ID NO: 388 - RNA, 50 nt, Artificial
  Part of exon 14 of the human dystrophin transcript
uggacagaagaccgcuggguucuuuuacaagacauccuucucaaauggca

SEQ ID NO: 389 - RNA, 53 nt, Artificial
  Part of exon 51 of the human dystrophin transcript
uggacagaacuuaccgacuggcuuucucugcuugaucaaguuauaaaaucaca

SEQ ID NO: 390 - RNA, 48 nt, Artificial
  Part of exon 14 of the human dystrophin transcript
uggguucuuuuacaagacauccuucucaaauggcaacgucuuacugaa

SEQ ID NO: 391 - RNA, 51 nt, Artificial
  Part of exon 53 of the human dystrophin transcript
ugggaugaaguacaagaacaccuucagaaccggaggcaacaguugaaugaa

SEQ ID NO: 392 - RNA, 22 nt, Artificial
  Part of exon 14 of the human dystrophin transcript
caaauggcaacgucuuacugaa

SEQ ID NO: 393 - RNA, 22 nt, Artificial
  Part of exon 55 of the human dystrophin transcript
caacugccaauguccuacagga

SEQ ID NO: 394 - RNA, 35 nt, Artificial
  Part of exon 14 of the human dystrophin transcript
cuuuuacaagacauccuucucaaauggcaacgucu

SEQ ID NO: 395 - RNA, 35 nt, Artificial
  Part of exon 57 of the human dystrophin transcript
cauuuggaagccaguucugaccaguggaagcgucu

SEQ ID NO: 396 - RNA, 22 nt, Artificial
  Part of exon 14 of the human dystrophin transcript
gaugggcaaacaucuguagaug

SEQ ID NO: 397 - RNA, 22 nt, Artificial
  Part of exon 59 of the human dystrophin transcript
gacuggcagagaaaaauagaug

SEQ ID NO: 398 - RNA, 36 nt, Artificial
  Part of exon 14 of the human dystrophin transcript
cuguagauggacagaagaccgcuggguucuuuuaca

SEQ ID NO: 399 - RNA, 37 nt, Artificial
  Part of exon 60 of the human dystrophin transcript
cucuggaagaccugaacaccagauggaagcuucugca

SEQ ID NO: 400 - RNA, 35 nt, Artificial
  Part of exon 15 of the human dystrophin transcript
agaaaaagaagaugcagugaacaagauucacacaa

SEQ ID NO: 401 - RNA, 37 nt, Artificial
  Part of exon 16 of the human dystrophin transcript
agaaaaagcaauccaugggcaaacuguauucacucaa

SEQ ID NO: 402 - RNA, 46 nt, Artificial
  Part of exon 15 of the human dystrophin transcript
cacaacuggcuuuaaagaucaaaaugaaauguuaucaagucuucaa

SEQ ID NO: 403 - RNA, 45 nt, Artificial
  Part of exon 18 of the human dystrophin transcript
cacagcuggauuacucgcucagaagcuguguugcagaguccugaa

SEQ ID NO: 404 - RNA, 34 nt, Artificial
  Part of exon 15 of the human dystrophin transcript
aaagaagaugcagugaacaagauucacacaacug

SEQ ID NO: 405 - RNA, 36 nt, Artificial
  Part of exon 20 of the human dystrophin transcript
aaugcagauagcaucaaacaagccucagaacaacug

SEQ ID NO: 406 - RNA, 27 nt, Artificial
  Part of exon 15 of the human dystrophin transcript
aacuggcuuuaaagaucaaaaugaaau

SEQ ID NO: 407 - RNA, 27 nt, Artificial
  Part of exon 23 of the human dystrophin transcript
aauuagccggaaauaucaaucagaauu

SEQ ID NO: 408 - RNA, 26 nt, Artificial
  Part of exon 15 of the human dystrophin transcript
uucagaaaaagaagaugcagugaaca

SEQ ID NO: 409 - RNA, 29 nt, Artificial
  Part of exon 24 of the human dystrophin transcript
uucuaaaaaagcagcugaaacagugcaga

SEQ ID NO: 410 - RNA, 76 nt, Artificial
  Part of exon 15 of the human dystrophin transcript
uuuuagugcauggcuuucagaaaaagaagaugcagugaacaagauucacacaacuggcuuuaaagaucaaaaugaa

SEQ ID NO: 411 - RNA, 77 nt, Artificial
  Part of exon 25 of the human dystrophin transcript
uuuuagucagugauauucagacaauucagcccagucuaaacagugucaaugaaggugggcagaagauaaagaaugaa

SEQ ID NO: 412 - RNA, 34 nt, Artificial
  Part of exon 15 of the human dystrophin transcript
auggcuuucagaaaaagaagaugcagugaacaag

SEQ ID NO: 413 - RNA, 32 nt, Artificial
  Part of exon 26 of the human dystrophin transcript
augaauuacagaaagcaguugaagagaugaag

SEQ ID NO: 414 - RNA, 21 nt, Artificial
  Part of exon 15 of the human dystrophin transcript
agaaaaagaagaugcagugaa

SEQ ID NO: 415 - RNA, 21 nt, Artificial
  Part of exon 27 of the human dystrophin transcript
acaaaaagaagcgaaagugaa

SEQ ID NO: 416 - RNA, 53 nt, Artificial
  Part of exon 15 of the human dystrophin transcript
cacacaacuggcuuuaaagaucaaaaugaaauguuaucaagucuucaaaaacu

SEQ ID NO: 417 - RNA, 53 nt, Artificial
  Part of exon 28 of the human dystrophin transcript
caaacaaguggcuaaaugaaguagaauuuaaacuuaaaaccacugaaaacauu

SEQ ID NO: 418 - RNA, 28 nt, Artificial
  Part of exon 15 of the human dystrophin transcript
agaagaugcagugaacaagauucacaca

SEQ ID NO: 419 - RNA, 28 nt, Artificial
  Part of exon 29 of the human dystrophin transcript
agaggauaacccaaaucagauucgcaua

SEQ ID NO: 420 - RNA, 34 nt, Artificial
  Part of exon 15 of the human dystrophin transcript
uuucagaaaaagaagaugcagugaacaagauuca

SEQ ID NO: 421 - RNA, 34 nt, Artificial
  Part of exon 30 of the human dystrophin transcript
uugcagacaagguggacgcagcucaaaugccuca

SEQ ID NO: 422 - RNA, 27 nt, Artificial
  Part of exon 15 of the human dystrophin transcript
aaaaugaaauguuaucaagucuucaaa

SEQ ID NO: 423 - RNA, 31 nt, Artificial
  Part of exon 31 of the human dystrophin transcript
aaaauccaaucugauuugacaagucaugaga

SEQ ID NO: 424 - RNA, 36 nt, Artificial
  Part of exon 15 of the human dystrophin transcript
gccuuuuuagugcauggcuuucagaaaaagaagaug

SEQ ID NO: 425 - RNA, 36 nt, Artificial
  Part of exon 32 of the human dystrophin transcript
gccaauuuugagcagcgucuacaagaaaguaagaug

SEQ ID NO: 426 - RNA, 19 nt, Artificial
  Part of exon 15 of the human dystrophin transcript
uucagaaaaagaagaugca

SEQ ID NO: 427 - RNA, 19 nt, Artificial
  Part of exon 33 of the human dystrophin transcript
uacagaaaaagcagacgga

SEQ ID NO: 428 - RNA, 85 nt, Artificial
  Part of exon 15 of the human dystrophin transcript
cagaaaaagaagaugcagugaacaagauucacacaacuggcuuuaaagaucaaaaugaaauguuaucaagucuucaaaaacuggc

SEQ ID NO: 429 - RNA, 81 nt, Artificial
  Part of exon 34 of the human dystrophin transcript
cagaaagaaagcaacaguuggagaaaugcuugaaauugucccguaagaugcgaaaggaaaugaaugucuugacagaauggc

SEQ ID NO: 430 - RNA, 37 nt, Artificial
  Part of exon 15 of the human dystrophin transcript
uucagaaaaagaagaugcagugaacaagauucacaca

SEQ ID NO: 431 - RNA, 37 nt, Artificial
  Part of exon 35 of the human dystrophin transcript
uugagaaacagaaggugcaccugaagaguaucacaga

SEQ ID NO: 432 - RNA, 38 nt, Artificial
  Part of exon 15 of the human dystrophin transcript
ugcauggcuuucagaaaaagaagaugcagugaacaaga

SEQ ID NO: 433 - RNA, 37 nt, Artificial
  Part of exon 36 of the human dystrophin transcript
uggaugaaucagagaaaaagaaaccccagcaaaaaga

SEQ ID NO: 434 - RNA, 18 nt, Artificial
  Part of exon 15 of the human dystrophin transcript
uuuaaagaucaaaaugaa

SEQ ID NO: 435 - RNA, 18 nt, Artificial
  Part of exon 37 of the human dystrophin transcript
uuuaaaggcagaacugaa

SEQ ID NO: 436 - RNA, 57 nt, Artificial
  Part of exon 15 of the human dystrophin transcript
ugcauggcuuucagaaaaagaagaugcagugaacaagauucacacaacuggcuuuaa

SEQ ID NO: 437 - RNA, 57 nt, Artificial
  Part of exon 38 of the human dystrophin transcript
uccauuccuuugaaggaauuggagcaguuuaacucagauauacaaaaauugcuugaa

SEQ ID NO: 438 - RNA, 71 nt, Artificial
  Part of exon 15 of the human dystrophin transcript
ucagaaaaagaagaugcagugaacaagauucacacaacuggcuuuaaagaucaaaaugaaauguuaucaag

SEQ ID NO: 439 - RNA, 67 nt, Artificial
  Part of exon 39 of the human dystrophin transcript
ugagagaaagcgagaggaaauaaagauaaaacagcagcuguuacagacaaaacauaaugcucucaag

SEQ ID NO: 440 - RNA, 79 nt, Artificial
  Part of exon 15 of the human dystrophin transcript
aaagaagaugcagugaacaagauucacacaacuggcuuuaaagaucaaaaugaaauguuaucaagucuucaaaaacugg

SEQ ID NO: 441 - RNA, 80 nt, Artificial
  Part of exon 40 of the human dystrophin transcript
aaagaagaaaaaaggcucuagaaauuucucaucagugguaucaguacaagaggcaggcugaugaucuccugaaaugcuug

SEQ ID NO: 442 - RNA, 25 nt, Artificial
  Part of exon 15 of the human dystrophin transcript
uuucagaaaaagaagaugcagugaa

SEQ ID NO: 443 - RNA, 26 nt, Artificial
  Part of exon 41 of the human dystrophin transcript
uugcagaagaagaaagaggagcugaa

SEQ ID NO: 444 - RNA, 13 nt, Artificial
  Part of exon 15 of the human dystrophin transcript
ggcuuuaaagauc

SEQ ID NO: 445 - RNA, 13 nt, Artificial
  Part of exon 42 of the human dystrophin transcript
gacuuugaagauc

SEQ ID NO: 446 - RNA, 85 nt, Artificial
  Part of exon 15 of the human dystrophin transcript
uuuuuagugcauggcuuucagaaaaagaagaugcagugaacaagauucacacaacuggcuuuaaagaucaaaaugaaauguuauc

SEQ ID NO: 447 - RNA, 90 nt, Artificial
  Part of exon 44 of the human dystrophin transcript
uauuuaaucaguggcuaacagaagcugaacaguuucucagaaagacacaaauuccugagaauugggaacaugcuaaauacaaaugguauc

SEQ ID NO: 448 - RNA, 35 nt, Artificial
  Part of exon 15 of the human dystrophin transcript
aagaucaaaaugaaauguuaucaagucuucaaaaa

SEQ ID NO: 449 - RNA, 35 nt, Artificial
  Part of exon 46 of the human dystrophin transcript
aagaacaaaagaauaucuugucagaauuucaaaga

SEQ ID NO: 450 - RNA, 33 nt, Artificial
  Part of exon 15 of the human dystrophin transcript
aagaucaaaaugaaauguuaucaagucuucaaa

SEQ ID NO: 451 - RNA, 34 nt, Artificial
  Part of exon 47 of the human dystrophin transcript
aagauaaacuugaaaauaagcucaagcagacaaa

SEQ ID NO: 452 - RNA, 27 nt, Artificial
  Part of exon 15 of the human dystrophin transcript
gcuuucagaaaaagaagaugcagugaa

SEQ ID NO: 453 - RNA, 26 nt, Artificial
  Part of exon 48 of the human dystrophin transcript
gcuugaagaccuugaagagcaguuaa

SEQ ID NO: 454 - RNA, 42 nt, Artificial
  Part of exon 15 of the human dystrophin transcript
gaaaaagaagaugcagugaacaagauucacacaacuggcuuu

SEQ ID NO: 455 - RNA, 38 nt, Artificial
  Part of exon 49 of the human dystrophin transcript
gaaacugaaauagcaguucaagcuaaacaaccggaugu

SEQ ID NO: 456 - RNA, 33 nt, Artificial
  Part of exon 15 of the human dystrophin transcript
uggcuuuaaagaucaaaaugaaauguuaucaag

SEQ ID NO: 457 - RNA, 34 nt, Artificial
  Part of exon 51 of the human dystrophin transcript
ugaccuugaggauaucaacgagaugaucaucaag

SEQ ID NO: 458 - RNA, 87 nt, Artificial
  Part of exon 15 of the human dystrophin transcript
uucagaaaaagaagaugcagugaacaagauucacacaacuggcuuuaaagaucaaaaugaaauguuaucaagucuucaaaaacuggc

SEQ ID NO: 459 - RNA, 87 nt, Artificial
  Part of exon 53 of the human dystrophin transcript
uucagaaucagugggaugaaguacaagaacaccuucagaaccggaggcaacaguugaaugaaauguuaaaggauucaacacaauggc

SEQ ID NO: 460 - RNA, 27 nt, Artificial
  Part of exon 15 of the human dystrophin transcript
uuuagugcauggcuuucagaaaaagaa

SEQ ID NO: 461 - RNA, 27 nt, Artificial
  Part of exon 55 of the human dystrophin transcript
uuucuugccuggcuuacagaagcugaa

SEQ ID NO: 462 - RNA, 19 nt, Artificial
  Part of exon 15 of the human dystrophin transcript
uucagaaaaagaagaugca

SEQ ID NO: 463 - RNA, 20 nt, Artificial
  Part of exon 57 of the human dystrophin transcript
uucagaagcagaacgaugua

SEQ ID NO: 464 - RNA, 22 nt, Artificial
  Part of exon 15 of the human dystrophin transcript
uggcuuucagaaaaagaagaug

SEQ ID NO: 465 - RNA, 23 nt, Artificial
  Part of exon 59 of the human dystrophin transcript
ugacuggcagagaaaaauagaug

SEQ ID NO: 466 - RNA, 16 nt, Artificial
  Part of exon 15 of the human dystrophin transcript
ucagaaaaagaagaug

SEQ ID NO: 467 - RNA, 16 nt, Artificial
  Part of exon 60 of the human dystrophin transcript
ucugaaagagaacgug

SEQ ID NO: 468 - RNA, 15 nt, Artificial
  Part of exon 16 of the human dystrophin transcript
aaaagaaaaagcaau

SEQ ID NO: 469 - RNA, 16 nt, Artificial
  Part of exon 18 of the human dystrophin transcript
aaaagaaaaagucaau

SEQ ID NO: 470 - RNA, 90 nt, Artificial
  Part of exon 16 of the human dystrophin transcript
uaagucagugacccagaagacggaagcauggcuggauaacuuugcccgguguugggauaauuuaguccaaaaacuugaaaagaguacagc

SEQ ID NO: 471 - RNA, 85 nt, Artificial
  Part of exon 20 of the human dystrophin transcript
uaagugagagacuuaacuggcuggaguaucagaacaacaucaucgcuuucuauaaucagcuacaacaauuggagcagaugacaac

SEQ ID NO: 472 - RNA, 30 nt, Artificial
  Part of exon 16 of the human dystrophin transcript
aagucagugacccagaagacggaagcaugg

SEQ ID NO: 473 - RNA, 30 nt, Artificial
  Part of exon 22 of the human dystrophin transcript
aacuuagugucaccgacuaugaaaucaugg

SEQ ID NO: 474 - RNA, 42 nt, Artificial
  Part of exon 16 of the human dystrophin transcript
aaaagcaauccaugggcaaacuguauucacucaaacaagauc

SEQ ID NO: 475 - RNA, 39 nt, Artificial
  Part of exon 23 of the human dystrophin transcript
aaaagcuagaggagcaaaugaauaaacuccgaaaaauuc

SEQ ID NO: 476 - RNA, 26 nt, Artificial
  Part of exon 16 of the human dystrophin transcript
acccagaagacggaagcauggcugga

SEQ ID NO: 477 - RNA, 24 nt, Artificial
  Part of exon 24 of the human dystrophin transcript
acccugaagaaauggauggcugaa

SEQ ID NO: 478 - RNA, 64 nt, Artificial
  Part of exon 16 of the human dystrophin transcript
aagacggaagcauggcuggauaacuuugcccgguguugggauaauuuaguccaaaaacuugaaa

SEQ ID NO: 479 - RNA, 61 nt, Artificial
  Part of exon 25 of the human dystrophin transcript
aagaaugaagcagagccagaguuugcuucgagacuugagacagaacucaaagaacuuaaca

SEQ ID NO: 480 - RNA, 30 nt, Artificial
  Part of exon 16 of the human dystrophin transcript
gggcaaacuguauucacucaaacaagaucu

SEQ ID NO: 481 - RNA, 29 nt, Artificial
  Part of exon 26 of the human dystrophin transcript
gagaaaacuguaagccuccagaaagaucu

SEQ ID NO: 482 - RNA, 19 nt, Artificial
  Part of exon 16 of the human dystrophin transcript
uuaaaagcggaucuagaaa

SEQ ID NO: 483 - RNA, 19 nt, Artificial
  Part of exon 27 of the human dystrophin transcript
uuaaaaaaggaacuugaaa

SEQ ID NO: 484 - RNA, 29 nt, Artificial
  Part of exon 16 of the human dystrophin transcript
gaaaaagcaauccaugggcaaacuguauu

SEQ ID NO: 485 - RNA, 29 nt, Artificial
  Part of exon 28 of the human dystrophin transcript
gagaaagcaaacaaguggcuaaaugaagu

SEQ ID NO: 486 - RNA, 21 nt, Artificial
  Part of exon 16 of the human dystrophin transcript
cagaagacggaagcauggcug

SEQ ID NO: 487 - RNA, 21 nt, Artificial
  Part of exon 29 of the human dystrophin transcript
cagauggcggagucauggaug

SEQ ID NO: 488 - RNA, 18 nt, Artificial
  Part of exon 16 of the human dystrophin transcript
cccagaagacggaagcau

SEQ ID NO: 489 - RNA, 18 nt, Artificial
  Part of exon 30 of the human dystrophin transcript
cccaggagacugaaaaau

SEQ ID NO: 490 - RNA, 26 nt, Artificial
  Part of exon 16 of the human dystrophin transcript
agaaaagaaaaagcaauccaugggca

SEQ ID NO: 491 - RNA, 27 nt, Artificial
  Part of exon 31 of the human dystrophin transcript
agaaaugaagaaacauaaucaggggaa

SEQ ID NO: 492 - RNA, 13 nt, Artificial
  Part of exon 16 of the human dystrophin transcript
uuaguccaaaaac

SEQ ID NO: 493 - RNA, 13 nt, Artificial
  Part of exon 32 of the human dystrophin transcript
uuauuccagaaac

SEQ ID NO: 494 - RNA, 24 nt, Artificial
  Part of exon 16 of the human dystrophin transcript
ccaaaaacuugaaaagaguacagc

SEQ ID NO: 495 - RNA, 28 nt, Artificial
  Part of exon 33 of the human dystrophin transcript
ccaaagaacuugaugaaagaguaacagc

SEQ ID NO: 496 - RNA, 25 nt, Artificial
  Part of exon 16 of the human dystrophin transcript
cggaucuagaaaagaaaaagcaauc

SEQ ID NO: 497 - RNA, 25 nt, Artificial
  Part of exon 34 of the human dystrophin transcript
cagauauggaauugacaaagagauc

SEQ ID NO: 498 - RNA, 25 nt, Artificial
  Part of exon 16 of the human dystrophin transcript
ggaucuagaaaagaaaaagcaaucc

SEQ ID NO: 499 - RNA, 25 nt, Artificial
  Part of exon 36 of the human dystrophin transcript
ggaugaaucagagaaaaagaaaccc

SEQ ID NO: 500 - RNA, 43 nt, Artificial
  Part of exon 16 of the human dystrophin transcript
aaaagcggaucuagaaaagaaaaagcaauccaugggcaaacug

SEQ ID NO: 501 - RNA, 48 nt, Artificial
  Part of exon 37 of the human dystrophin transcript
aaagguggacucuacacgugaccaagcagcaaacuugauggcaaaccg

SEQ ID NO: 502 - RNA, 45 nt, Artificial
  Part of exon 16 of the human dystrophin transcript
auucacucaaacaagaucuucuuucaacacugaagaauaagucag

SEQ ID NO: 503 - RNA, 47 nt, Artificial
  Part of exon 38 of the human dystrophin transcript
acucagauauacaaaaauugcuugaaccacuggaggcugaaauucag

SEQ ID NO: 504 - RNA, 54 nt, Artificial
  Part of exon 16 of the human dystrophin transcript
aacuguauucacucaaacaagaucuucuuucaacacugaagaauaagucaguga

SEQ ID NO: 505 - RNA, 55 nt, Artificial
  Part of exon 39 of the human dystrophin transcript
aaaagaauuguugcaaagaggagacaacuuacaacaaagaaucacagaugagaga

SEQ ID NO: 506 - RNA, 17 nt, Artificial
  Part of exon 16 of the human dystrophin transcript
aaaagcggaucuagaaa

SEQ ID NO: 507 - RNA, 17 nt, Artificial
  Part of exon 40 of the human dystrophin transcript
aaaaaaggcucuagaaa

SEQ ID NO: 508 - RNA, 24 nt, Artificial
  Part of exon 16 of the human dystrophin transcript
cagaagacggaagcauggcuggau

SEQ ID NO: 509 - RNA, 24 nt, Artificial
  Part of exon 41 of the human dystrophin transcript
cagaagaagaaagaggagcugaau

SEQ ID NO: 510 - RNA, 14 nt, Artificial
  Part of exon 16 of the human dystrophin transcript
acuguauucacuca

SEQ ID NO: 511 - RNA, 14 nt, Artificial
  Part of exon 42 of the human dystrophin transcript
acugaaaucacuca

SEQ ID NO: 512 - RNA, 34 nt, Artificial
  Part of exon 16 of the human dystrophin transcript
acugaagaauaagucagugacccagaagacggaa

SEQ ID NO: 513 - RNA, 33 nt, Artificial
  Part of exon 44 of the human dystrophin transcript
acagaagcugaacaguuucucagaaagacacaa

SEQ ID NO: 514 - RNA, 26 nt, Artificial
  Part of exon 16 of the human dystrophin transcript
aaaagcggaucuagaaaagaaaaagc

SEQ ID NO: 515 - RNA, 26 nt, Artificial
  Part of exon 46 of the human dystrophin transcript
aaaagagcagcaacuaaaagaaaagc

SEQ ID NO: 516 - RNA, 15 nt, Artificial
  Part of exon 16 of the human dystrophin transcript
aaaaacuugaaaaga

SEQ ID NO: 517 - RNA, 15 nt, Artificial
  Part of exon 47 of the human dystrophin transcript
auaaacuugaaaaua

SEQ ID NO: 518 - RNA, 37 nt, Artificial
  Part of exon 16 of the human dystrophin transcript
agcaauccaugggcaaacuguauucacucaaacaaga

SEQ ID NO: 519 - RNA, 38 nt, Artificial
  Part of exon 48 of the human dystrophin transcript
aggaaucaguuggaaauuuauaaccaaccaaaccaaga

SEQ ID NO: 520 - RNA, 32 nt, Artificial
  Part of exon 16 of the human dystrophin transcript
uuucaacacugaagaauaagucagugacccag

SEQ ID NO: 521 - RNA, 32 nt, Artificial
  Part of exon 49 of the human dystrophin transcript
uuuguacaaggaaaaaccagccacucagccag

SEQ ID NO: 522 - RNA, 44 nt, Artificial
  Part of exon 16 of the human dystrophin transcript
gcaaacuguauucacucaaacaagaucuucuuucaacacugaag

SEQ ID NO: 523 - RNA, 43 nt, Artificial
  Part of exon 51 of the human dystrophin transcript
ggaaacugccaucuccaaacuagaaaugccaucuuccuugaug

SEQ ID NO: 524 - RNA, 25 nt, Artificial
  Part of exon 16 of the human dystrophin transcript
aaagaaaaagcaauccaugggcaaa

SEQ ID NO: 525 - RNA, 25 nt, Artificial
  Part of exon 53 of the human dystrophin transcript
acaguagaugcaauccaaaagaaaa

SEQ ID NO: 526 - RNA, 38 nt, Artificial
  Part of exon 16 of the human dystrophin transcript
gaagaauaagucagugacccagaagacggaagcauggc

SEQ ID NO: 527 - RNA, 40 nt, Artificial
  Part of exon 55 of the human dystrophin transcript
gaagacuccaagggaguaaaagagcugaugaaacaauggc

SEQ ID NO: 528 - RNA, 57 nt, Artificial
  Part of exon 16 of the human dystrophin transcript
uucacucaaacaagaucuucuuucaacacugaagaauaagucagugacccagaagac

SEQ ID NO: 529 - RNA, 60 nt, Artificial
  Part of exon 57 of the human dystrophin transcript
uucucugcaggaacuucugguguggcuacagcugaaagaugaugaauuaagccggcaggc

SEQ ID NO: 530 - RNA, 55 nt, Artificial
  Part of exon 16 of the human dystrophin transcript
gcaauccaugggcaaacuguauucacucaaacaagaucuucuuucaacacugaag

SEQ ID NO: 531 - RNA, 58 nt, Artificial
  Part of exon 59 of the human dystrophin transcript
gcagcccgugggcgaucuccucauugacucucuccaagaucaccucgagaaagucaag

SEQ ID NO: 532 - RNA, 16 nt, Artificial
  Part of exon 16 of the human dystrophin transcript
cagaagacggaagcau

SEQ ID NO: 533 - RNA, 16 nt, Artificial
  Part of exon 60 of the human dystrophin transcript
caccagauggaagcuu

SEQ ID NO: 534 - RNA, 29 nt, Artificial
  Part of exon 17 of the human dystrophin transcript
aucacuaacacagacaacuguaauggaaa

SEQ ID NO: 535 - RNA, 28 nt, Artificial
  Part of exon 18 of the human dystrophin transcript
auuacucgcucagaagcuguguugcaga

SEQ ID NO: 536 - RNA, 28 nt, Artificial
  Part of exon 17 of the human dystrophin transcript
gaacuuccaccaccaccuccccaaaaga

SEQ ID NO: 537 - RNA, 27 nt, Artificial
  Part of exon 20 of the human dystrophin transcript
gaaaauccaacccaccaccccaucaga

SEQ ID NO: 538 - RNA, 17 nt, Artificial
  Part of exon 17 of the human dystrophin transcript
ccaccacucagccauca

SEQ ID NO: 539 - RNA, 17 nt, Artificial
  Part of exon 22 of the human dystrophin transcript
ccaccaaugcgcuauca

SEQ ID NO: 540 - RNA, 49 nt, Artificial
  Part of exon 17 of the human dystrophin transcript
caccaccuccccaaaagaagaggcagauuacuguggauucugaaauuag

SEQ ID NO: 541 - RNA, 48 nt, Artificial
  Part of exon 23 of the human dystrophin transcript
cagcaccacugugaaagagaugucgaagaaagcgcccucugaaauuag

SEQ ID NO: 542 - RNA, 23 nt, Artificial
  Part of exon 17 of the human dystrophin transcript
uguggauucugaaauuaggaaaa

SEQ ID NO: 543 - RNA, 23 nt, Artificial
  Part of exon 24 of the human dystrophin transcript
uggggauucagaaauucuaaaaa

SEQ ID NO: 544 - RNA, 29 nt, Artificial
  Part of exon 17 of the human dystrophin transcript
aaacaguaacuacggugaccacaagggaa

SEQ ID NO: 545 - RNA, 32 nt, Artificial
  Part of exon 25 of the human dystrophin transcript
aaacagugucaaugaaggugggcagaagauaa

SEQ ID NO: 546 - RNA, 39 nt, Artificial
  Part of exon 17 of the human dystrophin transcript
aagaggaacuuccaccaccaccuccccaaaagaagaggc

SEQ ID NO: 547 - RNA, 39 nt, Artificial
  Part of exon 27 of the human dystrophin transcript
aaaaggaacuugaaacucuaaccaccaacuaccaguggc

SEQ ID NO: 548 - RNA, 65 nt, Artificial
  Part of exon 17 of the human dystrophin transcript
aacacagacaacuguaauggaaacaguaacuacggugaccacaagggaacagauccugguaaagc

SEQ ID NO: 549 - RNA, 68 nt, Artificial
  Part of exon 28 of the human dystrophin transcript
aaagcaaacaaguggcuaaaugaaguagaauuuaaacuuaaaaccacugaaaacauuccuggcggagc

SEQ ID NO: 550 - RNA, 29 nt, Artificial
  Part of exon 17 of the human dystrophin transcript
uccugguaaagcaugcucaagaggaacuu

SEQ ID NO: 551 - RNA, 29 nt, Artificial
  Part of exon 29 of the human dystrophin transcript
ucauggaugagcuaaucaaugaggaacuu

SEQ ID NO: 552 - RNA, 33 nt, Artificial
  Part of exon 17 of the human dystrophin transcript
aaaagaagaggcagauuacuguggauucugaaa

SEQ ID NO: 553 - RNA, 33 nt, Artificial
  Part of exon 30 of the human dystrophin transcript
aacagagcauccagucugcccaggagacugaaa

SEQ ID NO: 554 - RNA, 27 nt, Artificial
  Part of exon 17 of the human dystrophin transcript
agggaacagauccugguaaagcaugcu

SEQ ID NO: 555 - RNA, 27 nt, Artificial
  Part of exon 31 of the human dystrophin transcript
aagaaacauaaucaggggaaggaggcu

SEQ ID NO: 556 - RNA, 56 nt, Artificial
  Part of exon 17 of the human dystrophin transcript
cuguaauggaaacaguaacuacggugaccacaagggaacagauccugguaaagcau

SEQ ID NO: 557 - RNA, 56 nt, Artificial
  Part of exon 32 of the human dystrophin transcript
cugcauuggaaacaaagaguguggaacaggaaguaguacagucacagcuaaaucau

SEQ ID NO: 558 - RNA, 40 nt, Artificial
  Part of exon 17 of the human dystrophin transcript
agaagaggcagauuacuguggauucugaaauuaggaaaag

SEQ ID NO: 559 - RNA, 38 nt, Artificial
  Part of exon 33 of the human dystrophin transcript
auaaaagucugagugaagugaagucugaaguggaaaug

SEQ ID NO: 560 - RNA, 27 nt, Artificial
  Part of exon 17 of the human dystrophin transcript
aggcagauuacuguggauucugaaauu

SEQ ID NO: 561 - RNA, 27 nt, Artificial
  Part of exon 34 of the human dystrophin transcript
augccuaguaauuuggauucugaaguu

SEQ ID NO: 562 - RNA, 19 nt, Artificial
  Part of exon 17 of the human dystrophin transcript
caccuccccaaaagaagag

SEQ ID NO: 563 - RNA, 19 nt, Artificial
  Part of exon 35 of the human dystrophin transcript
caccucccgagcagaagag

SEQ ID NO: 564 - RNA, 13 nt, Artificial
  Part of exon 17 of the human dystrophin transcript
ccaaaagaagagg

SEQ ID NO: 565 - RNA, 13 nt, Artificial
  Part of exon 36 of the human dystrophin transcript
caaaaagaagacg

SEQ ID NO: 566 - RNA, 38 nt, Artificial
  Part of exon 17 of the human dystrophin transcript
cagacaacuguaauggaaacaguaacuacggugaccac

SEQ ID NO: 567 - RNA, 32 nt, Artificial
  Part of exon 37 of the human dystrophin transcript
cagcaaacuugauggcaaaccgcggugaccac

SEQ ID NO: 568 - RNA, 14 nt, Artificial
  Part of exon 17 of the human dystrophin transcript
uggauucugaaauu

SEQ ID NO: 569 - RNA, 14 nt, Artificial
  Part of exon 38 of the human dystrophin transcript
uggaggcugaaauu

SEQ ID NO: 570 - RNA, 42 nt, Artificial
  Part of exon 17 of the human dystrophin transcript
aaagaagaggcagauuacuguggauucugaaauuaggaaaag

SEQ ID NO: 571 - RNA, 44 nt, Artificial
  Part of exon 39 of the human dystrophin transcript
aaagaggagacaacuuacaacaaagaaucacagaugagagaaag

SEQ ID NO: 572 - RNA, 35 nt, Artificial
  Part of exon 17 of the human dystrophin transcript
caaaagaagaggcagauuacuguggauucugaaau

SEQ ID NO: 573 - RNA, 34 nt, Artificial
  Part of exon 40 of the human dystrophin transcript
caguacaagaggcaggcugaugaucuccugaaau

SEQ ID NO: 574 - RNA, 30 nt, Artificial
  Part of exon 17 of the human dystrophin transcript
cagauccugguaaagcaugcucaagaggaa

SEQ ID NO: 575 - RNA, 29 nt, Artificial
  Part of exon 41 of the human dystrophin transcript
cagauccagcucagcaagcgcuggcggga

SEQ ID NO: 576 - RNA, 25 nt, Artificial
  Part of exon 17 of the human dystrophin transcript
aaaagaagaggcagauuacugugga

SEQ ID NO: 577 - RNA, 25 nt, Artificial
  Part of exon 42 of the human dystrophin transcript
aaacgaugauggugaugacugaaga

SEQ ID NO: 578 - RNA, 27 nt, Artificial
  Part of exon 17 of the human dystrophin transcript
aagaggcagauuacuguggauucugaa

SEQ ID NO: 579 - RNA, 27 nt, Artificial
  Part of exon 44 of the human dystrophin transcript
aagacacaaauuccugagaauugggaa

SEQ ID NO: 580 - RNA, 19 nt, Artificial
  Part of exon 17 of the human dystrophin transcript
gaagaggcagauuacugug

SEQ ID NO: 581 - RNA, 19 nt, Artificial
  Part of exon 46 of the human dystrophin transcript
gaggaagcagauaacauug

SEQ ID NO: 582 - RNA, 42 nt, Artificial
  Part of exon 17 of the human dystrophin transcript
gaccacaagggaacagauccugguaaagcaugcucaagagga

SEQ ID NO: 583 - RNA, 42 nt, Artificial
  Part of exon 47 of the human dystrophin transcript
gcccagaagagcaagauaaacuugaaaauaagcucaagcaga

SEQ ID NO: 584 - RNA, 24 nt, Artificial
  Part of exon 17 of the human dystrophin transcript
uacuguggauucugaaauuaggaa

SEQ ID NO: 585 - RNA, 25 nt, Artificial
  Part of exon 48 of the human dystrophin transcript
ugcugugguuaucuccuauuaggaa

SEQ ID NO: 586 - RNA, 15 nt, Artificial
  Part of exon 17 of the human dystrophin transcript
accaccacucagcca

SEQ ID NO: 587 - RNA, 16 nt, Artificial
  Part of exon 49 of the human dystrophin transcript
accagccacucagcca

SEQ ID NO: 588 - RNA, 24 nt, Artificial
  Part of exon 17 of the human dystrophin transcript
aaacaguaacuacggugaccacaa

SEQ ID NO: 589 - RNA, 23 nt, Artificial
  Part of exon 51 of the human dystrophin transcript
agacuguuacucuggugacacaa

SEQ ID NO: 590 - RNA, 30 nt, Artificial
  Part of exon 17 of the human dystrophin transcript
ccaucacuaacacagacaacuguaauggaa

SEQ ID NO: 591 - RNA, 32 nt, Artificial
  Part of exon 53 of the human dystrophin transcript
ccuucagaaccggaggcaacaguugaaugaaa

SEQ ID NO: 592 - RNA, 18 nt, Artificial
  Part of exon 17 of the human dystrophin transcript
cuccccaaaagaagaggc

SEQ ID NO: 593 - RNA, 18 nt, Artificial
  Part of exon 55 of the human dystrophin transcript
cuacccguaaggaaaggc

SEQ ID NO: 594 - RNA, 21 nt, Artificial
  Part of exon 17 of the human dystrophin transcript
agcaugcucaagaggaacuuc

SEQ ID NO: 595 - RNA, 21 nt, Artificial
  Part of exon 57 of the human dystrophin transcript
accuuucucugcaggaacuuc

SEQ ID NO: 596 - RNA, 43 nt, Artificial
  Part of exon 17 of the human dystrophin transcript
gugaccacaagggaacagauccugguaaagcaugcucaagagg

SEQ ID NO: 597 - RNA, 45 nt, Artificial
  Part of exon 59 of the human dystrophin transcript
gagcccagaaugucacucggcuucuacgaaagcaggcugaggagg

SEQ ID NO: 598 - RNA, 39 nt, Artificial
  Part of exon 17 of the human dystrophin transcript
uuucacaggcugucaccaccacucagccaucacuaacac

SEQ ID NO: 599 - RNA, 40 nt, Artificial
  Part of exon 60 of the human dystrophin transcript
ucucaccguauaaccucagcacucuggaagaccugaacac

SEQ ID NO: 600 - RNA, 32 nt, Artificial
  Part of exon 18 of the human dystrophin transcript
gaagcuguguugcagaguccugaauuugcaau

SEQ ID NO: 601 - RNA, 28 nt, Artificial
  Part of exon 43 of the human dystrophin transcript
gaagcucucucccagcuugauuuccaau

SEQ ID NO: 602 - RNA, 56 nt, Artificial
  Part of exon 18 of the human dystrophin transcript
gaguccugaauuugcaaucuuucggaaggaaggcaacuucucagacuuaaaagaaa

SEQ ID NO: 603 - RNA, 57 nt, Artificial
  Part of exon 45 of the human dystrophin transcript
gaagccugaaucugcgguggcaggaggucugcaaacagcugucagacagaaaaaaga

SEQ ID NO: 604 - RNA, 17 nt, Artificial
  Part of exon 18 of the human dystrophin transcript
uaaaagaaaaagucaau

SEQ ID NO: 605 - RNA, 17 nt, Artificial
  Part of exon 54 of the human dystrophin transcript
uaacagagaauaucaau

SEQ ID NO: 606 - RNA, 23 nt, Artificial
  Part of exon 18 of the human dystrophin transcript
gauguugauauaacugaacuuca

SEQ ID NO: 607 - RNA, 24 nt, Artificial
  Part of exon 56 of the human dystrophin transcript
gacguuuggauaacaugaacuuca

SEQ ID NO: 608 - RNA, 59 nt, Artificial
  Part of exon 19 of the human dystrophin transcript
aguucagaaaacugcaagaugccagcagaucagcucaggcccugguggaacagauggug

SEQ ID NO: 609 - RNA, 59 nt, Artificial
  Part of exon 20 of the human dystrophin transcript
aaugcagauagcaucaaacaagccucagaacaacugaacagccgguggaucgaauucug

SEQ ID NO: 610 - RNA, 29 nt, Artificial
  Part of exon 19 of the human dystrophin transcript
ucagaaaacugcaagaugccagcagauca

SEQ ID NO: 611 - RNA, 28 nt, Artificial
  Part of exon 22 of the human dystrophin transcript
ucaggagaccaugagugccaucaggaca

SEQ ID NO: 612 - RNA, 70 nt, Artificial
  Part of exon 19 of the human dystrophin transcript
agcgagaaaaagcugagaaguucagaaaacugcaagaugccagcagaucagcucaggcccugguggaaca

SEQ ID NO: 613 - RNA, 74 nt, Artificial
  Part of exon 23 of the human dystrophin transcript
agccggaaauaucaaucagaauuugaagaaauugagggacgcuggaagaagcucuccucccagcugguugagca

SEQ ID NO: 614 - RNA, 33 nt, Artificial
  Part of exon 19 of the human dystrophin transcript
aucagcucaggcccugguggaacagauggugaa

SEQ ID NO: 615 - RNA, 35 nt, Artificial
  Part of exon 24 of the human dystrophin transcript
aucacauacaaacccugaagaaauggauggcugaa

SEQ ID NO: 616 - RNA, 39 nt, Artificial
  Part of exon 19 of the human dystrophin transcript
agagcgagaaaaagcugagaaguucagaaaacugcaaga

SEQ ID NO: 617 - RNA, 42 nt, Artificial
  Part of exon 25 of the human dystrophin transcript
agagccagaguuugcuucgagacuugagacagaacucaaaga

SEQ ID NO: 618 - RNA, 86 nt, Artificial
  Part of exon 19 of the human dystrophin transcript
gccauagagcgagaaaaagcugagaaguucagaaaacugcaagaugccagcagaucagcucaggcccugguggaacagauggugaa

SEQ ID NO: 619 - RNA, 93 nt, Artificial
  Part of exon 26 of the human dystrophin transcript
gccagaaaggaggccuugaagggagguuuggagaaaacuguaagccuccagaaagaucuaucagagaugcacgaauggaugacacaagcugaa

SEQ ID NO: 620 - RNA, 28 nt, Artificial
  Part of exon 19 of the human dystrophin transcript
agcugagaaguucagaaaacugcaagau

SEQ ID NO: 621 - RNA, 28 nt, Artificial
  Part of exon 28 of the human dystrophin transcript
agcugaggaaaucucugaggugcuagau

SEQ ID NO: 622 - RNA, 45 nt, Artificial
  Part of exon 19 of the human dystrophin transcript
agaugccagcagaucagcucaggcccugguggaacagauggugaa

SEQ ID NO: 623 - RNA, 38 nt, Artificial
  Part of exon 29 of the human dystrophin transcript
agauucgcauauuggcacagacccuaacagauggcgga

SEQ ID NO: 624 - RNA, 55 nt, Artificial
  Part of exon 19 of the human dystrophin transcript
cauagagcgagaaaaagcugagaaguucagaaaacugcaagaugccagcagauca

SEQ ID NO: 625 - RNA, 55 nt, Artificial
  Part of exon 30 of the human dystrophin transcript
cauucauugacaagcaguuggcagcuuauauugcagacaagguggacgcagcuca

SEQ ID NO: 626 - RNA, 22 nt, Artificial
  Part of exon 19 of the human dystrophin transcript
agaugccagcagaucagcucag

SEQ ID NO: 627 - RNA, 22 nt, Artificial
  Part of exon 31 of the human dystrophin transcript
acaagucaugagaucaguuuag

SEQ ID NO: 628 - RNA, 22 nt, Artificial
  Part of exon 19 of the human dystrophin transcript
agaaaacugcaagaugccagca

SEQ ID NO: 629 - RNA, 22 nt, Artificial
  Part of exon 32 of the human dystrophin transcript
aaaaaauuacaagaugucucca

SEQ ID NO: 630 - RNA, 49 nt, Artificial
  Part of exon 19 of the human dystrophin transcript
agaaaaagcugagaaguucagaaaacugcaagaugccagcagaucagcu

SEQ ID NO: 631 - RNA, 50 nt, Artificial
  Part of exon 33 of the human dystrophin transcript
agaaaaagcagacggaaaaucccaaagaacuugaugaaagaguaacagcu

SEQ ID NO: 632 - RNA, 37 nt, Artificial
  Part of exon 19 of the human dystrophin transcript
cauagagcgagaaaaagcugagaaguucagaaaacug

SEQ ID NO: 633 - RNA, 38 nt, Artificial
  Part of exon 34 of the human dystrophin transcript
cagaaagaaagcaacaguuggagaaaugcuugaaauug

SEQ ID NO: 634 - RNA, 71 nt, Artificial
  Part of exon 19 of the human dystrophin transcript
agcugagaaguucagaaaacugcaagaugccagcagaucagcucaggcccugguggaacagauggugaaug

SEQ ID NO: 635 - RNA, 72 nt, Artificial
  Part of exon 35 of the human dystrophin transcript
accugaagaguaucacagagguaggagaggccuugaaaacaguuuugggcaagaaggagacguugguggaag

SEQ ID NO: 636 - RNA, 40 nt, Artificial
  Part of exon 19 of the human dystrophin transcript
gcugagaaguucagaaaacugcaagaugccagcagaucag

SEQ ID NO: 637 - RNA, 40 nt, Artificial
  Part of exon 37 of the human dystrophin transcript
ggugaccacugcaggaaauuaguagagccccaaaucucag

SEQ ID NO: 638 - RNA, 15 nt, Artificial
  Part of exon 19 of the human dystrophin transcript
agcagaucagcucag

SEQ ID NO: 639 - RNA, 15 nt, Artificial
  Part of exon 38 of the human dystrophin transcript
agcaguuuaacucag

SEQ ID NO: 640 - RNA, 39 nt, Artificial
  Part of exon 19 of the human dystrophin transcript
cauagagcgagaaaaagcugagaaguucagaaaacugca

SEQ ID NO: 641 - RNA, 42 nt, Artificial
  Part of exon 39 of the human dystrophin transcript
cacagaugagagaaagcgagaggaaauaaagauaaaacagca

SEQ ID NO: 642 - RNA, 77 nt, Artificial
  Part of exon 19 of the human dystrophin transcript
cgagaaaaagcugagaaguucagaaaacugcaagaugccagcagaucagcucaggcccugguggaacagauggugaa

SEQ ID NO: 643 - RNA, 77 nt, Artificial
  Part of exon 40 of the human dystrophin transcript
cuagaaauuucucaucagugguaucaguacaagaggcaggcugaugaucuccugaaaugcuuggaugacauugaaaa

SEQ ID NO: 644 - RNA, 27 nt, Artificial
  Part of exon 19 of the human dystrophin transcript
cagaucagcucaggcccugguggaaca

SEQ ID NO: 645 - RNA, 31 nt, Artificial
  Part of exon 41 of the human dystrophin transcript
cagauccagcucagcaagcgcuggcgggaaa

SEQ ID NO: 646 - RNA, 19 nt, Artificial
  Part of exon 19 of the human dystrophin transcript
guggaacagauggugaaug

SEQ ID NO: 647 - RNA, 19 nt, Artificial
  Part of exon 42 of the human dystrophin transcript
guggaacaacuucucaaug

SEQ ID NO: 648 - RNA, 47 nt, Artificial
  Part of exon 19 of the human dystrophin transcript
cauagagcgagaaaaagcugagaaguucagaaaacugcaagaugcca

SEQ ID NO: 649 - RNA, 45 nt, Artificial
  Part of exon 44 of the human dystrophin transcript
cagaaagacacaaauuccugagaauugggaacaugcuaaauacaa

SEQ ID NO: 650 - RNA, 20 nt, Artificial
  Part of exon 19 of the human dystrophin transcript
agaaaaagcugagaaguuca

SEQ ID NO: 651 - RNA, 20 nt, Artificial
  Part of exon 46 of the human dystrophin transcript
agaaaagcuugagcaaguca

SEQ ID NO: 652 - RNA, 43 nt, Artificial
  Part of exon 19 of the human dystrophin transcript
agaaguucagaaaacugcaagaugccagcagaucagcucaggc

SEQ ID NO: 653 - RNA, 43 nt, Artificial
  Part of exon 47 of the human dystrophin transcript
auaagcccagaagagcaagauaaacuugaaaauaagcucaagc

SEQ ID NO: 654 - RNA, 36 nt, Artificial
  Part of exon 19 of the human dystrophin transcript
agcagaucagcucaggcccugguggaacagauggug

SEQ ID NO: 655 - RNA, 40 nt, Artificial
  Part of exon 49 of the human dystrophin transcript
agcaguucaagcuaaacaaccggauguggaagagauuuug

SEQ ID NO: 656 - RNA, 39 nt, Artificial
  Part of exon 19 of the human dystrophin transcript
gaaaaagcugagaaguucagaaaacugcaagaugccagc

SEQ ID NO: 657 - RNA, 40 nt, Artificial
  Part of exon 53 of the human dystrophin transcript
gaagaagcugagcaggucuuaggacaggccagagccaagc

SEQ ID NO: 658 - RNA, 31 nt, Artificial
  Part of exon 19 of the human dystrophin transcript
agaaguucagaaaacugcaagaugccagcag

SEQ ID NO: 659 - RNA, 31 nt, Artificial
  Part of exon 55 of the human dystrophin transcript
agaagcugaaacaacugccaauguccuacag

SEQ ID NO: 660 - RNA, 20 nt, Artificial
  Part of exon 19 of the human dystrophin transcript
gcaagaugccagcagaucag

SEQ ID NO: 661 - RNA, 20 nt, Artificial
  Part of exon 57 of the human dystrophin transcript
gcgacuuuccagcaguucag

SEQ ID NO: 662 - RNA, 34 nt, Artificial
  Part of exon 19 of the human dystrophin transcript
aacugcaagaugccagcagaucagcucaggcccu

SEQ ID NO: 663 - RNA, 31 nt, Artificial
  Part of exon 59 of the human dystrophin transcript
aacuucaagaggccacggaugagcuggaccu

SEQ ID NO: 664 - RNA, 38 nt, Artificial
  Part of exon 19 of the human dystrophin transcript
agaaguucagaaaacugcaagaugccagcagaucagcu

SEQ ID NO: 665 - RNA, 36 nt, Artificial
  Part of exon 60 of the human dystrophin transcript
auaaccucagcacucuggaagaccugaacaccagau

SEQ ID NO: 666 - RNA, 50 nt, Artificial
  Part of exon 20 of the human dystrophin transcript
aacccaccaccccaucagagccaacagcaauuaaaagucaguuaaaaauu

SEQ ID NO: 667 - RNA, 50 nt, Artificial
  Part of exon 21 of the human dystrophin transcript
aagucaaccggcuaucaggucuucaaccucaaauugaacgauuaaaaauu

SEQ ID NO: 668 - RNA, 14 nt, Artificial
  Part of exon 20 of the human dystrophin transcript
acaacaauuggagc

SEQ ID NO: 669 - RNA, 14 nt, Artificial
  Part of exon 50 of the human dystrophin transcript
accacuauuggagc

SEQ ID NO: 670 - RNA, 79 nt, Artificial
  Part of exon 20 of the human dystrophin transcript
caauuggagcagaugacaacuacugcugaaaacugguugaaaauccaacccaccaccccaucagagccaacagcaauua

SEQ ID NO: 671 - RNA, 73 nt, Artificial
  Part of exon 52 of the human dystrophin transcript
caguuggaagaacucauuaccgcugcccaaaauuugaaaaacaagaccagcaaucaagaggcuagaacaauca

SEQ ID NO: 672 - RNA, 23 nt, Artificial
  Part of exon 20 of the human dystrophin transcript
acugaacagccgguggaucgaau

SEQ ID NO: 673 - RNA, 23 nt, Artificial
  Part of exon 58 of the human dystrophin transcript
acagagcagccuuuggaaggacu

SEQ ID NO: 674 - RNA, 15 nt, Artificial
  Part of exon 21 of the human dystrophin transcript
caaccggcuaucagg

SEQ ID NO: 675 - RNA, 15 nt, Artificial
  Part of exon 22 of the human dystrophin transcript
caaugcgcuaucagg

SEQ ID NO: 676 - RNA, 23 nt, Artificial
  Part of exon 21 of the human dystrophin transcript
ucaaagcauagcccugaaagaga

SEQ ID NO: 677 - RNA, 23 nt, Artificial
  Part of exon 23 of the human dystrophin transcript
ucucagcaccacugugaaagaga

SEQ ID NO: 678 - RNA, 32 nt, Artificial
  Part of exon 21 of the human dystrophin transcript
gauuaaaaauucaaagcauagcccugaaagag

SEQ ID NO: 679 - RNA, 33 nt, Artificial
  Part of exon 24 of the human dystrophin transcript
gauucagaaauucuaaaaaagcagcugaaacag

SEQ ID NO: 680 - RNA, 54 nt, Artificial
  Part of exon 21 of the human dystrophin transcript
cauuuuaagcaagucuuuucugaugugcaggccagagagaaagagcuacagaca

SEQ ID NO: 681 - RNA, 55 nt, Artificial
  Part of exon 25 of the human dystrophin transcript
cagucuaaacagugucaaugaaggugggcagaagauaaagaaugaagcagagcca

SEQ ID NO: 682 - RNA, 17 nt, Artificial
  Part of exon 21 of the human dystrophin transcript
agaaagagcuacagaca

SEQ ID NO: 683 - RNA, 18 nt, Artificial
  Part of exon 26 of the human dystrophin transcript
agaaagaucuaucagaga

SEQ ID NO: 684 - RNA, 19 nt, Artificial
  Part of exon 21 of the human dystrophin transcript
cugaaagagaaaggacaag

SEQ ID NO: 685 - RNA, 18 nt, Artificial
  Part of exon 27 of the human dystrophin transcript
cugaaugggaaaugcaag

SEQ ID NO: 686 - RNA, 17 nt, Artificial
  Part of exon 21 of the human dystrophin transcript
auuaaaaauucaaagca

SEQ ID NO: 687 - RNA, 17 nt, Artificial
  Part of exon 28 of the human dystrophin transcript
auuuaaacuuaaaacca

SEQ ID NO: 688 - RNA, 24 nt, Artificial
  Part of exon 21 of the human dystrophin transcript
gauuaaaaauucaaagcauagccc

SEQ ID NO: 689 - RNA, 24 nt, Artificial
  Part of exon 29 of the human dystrophin transcript
gaugcgacauucagaggauaaccc

SEQ ID NO: 690 - RNA, 33 nt, Artificial
  Part of exon 21 of the human dystrophin transcript
ccucaaauugaacgauuaaaaauucaaagcaua

SEQ ID NO: 691 - RNA, 33 nt, Artificial
  Part of exon 30 of the human dystrophin transcript
ccucacauucauugacaagcaguuggcagcuua

SEQ ID NO: 692 - RNA, 28 nt, Artificial
  Part of exon 21 of the human dystrophin transcript
aagucuuuucugaugugcaggccagaga

SEQ ID NO: 693 - RNA, 30 nt, Artificial
  Part of exon 31 of the human dystrophin transcript
aaauccaaucugauuugacaagucaugaga

SEQ ID NO: 694 - RNA, 72 nt, Artificial
  Part of exon 21 of the human dystrophin transcript
ugaagucaaccggcuaucaggucuucaaccucaaauugaacgauuaaaaauucaaagcauagcccugaaaga

SEQ ID NO: 695 - RNA, 69 nt, Artificial
  Part of exon 32 of the human dystrophin transcript
ugaaguggaaauggugauaaagacuggacgucagauuguacagaaaaagcagacggaaaaucccaaaga

SEQ ID NO: 696 - RNA, 79 nt, Artificial
  Part of exon 21 of the human dystrophin transcript
aaaaauucaaagcauagcccugaaagagaaaggacaaggacccauguuccuggaugcagacuuuguggccuuuacaaau

SEQ ID NO: 697 - RNA, 74 nt, Artificial
  Part of exon 33 of the human dystrophin transcript
agaaaugcuugaaauugucccguaagaugcgaaaggaaaugaaugucuugacagaauggcuggcagcuacagau

SEQ ID NO: 698 - RNA, 28 nt, Artificial
  Part of exon 21 of the human dystrophin transcript
guggccuuuacaaaucauuuuaagcaag

SEQ ID NO: 699 - RNA, 27 nt, Artificial
  Part of exon 34 of the human dystrophin transcript
gaggccuugaaaacaguuuugggcaag

SEQ ID NO: 700 - RNA, 27 nt, Artificial
  Part of exon 21 of the human dystrophin transcript
uuuguggccuuuacaaaucauuuuaag

SEQ ID NO: 701 - RNA, 27 nt, Artificial
  Part of exon 35 of the human dystrophin transcript
uuugcagccauuucacacagaauuaag

SEQ ID NO: 702 - RNA, 13 nt, Artificial
  Part of exon 21 of the human dystrophin transcript
cugaaagagaaag

SEQ ID NO: 703 - RNA, 13 nt, Artificial
  Part of exon 36 of the human dystrophin transcript
cugaaagaggaag

SEQ ID NO: 704 - RNA, 36 nt, Artificial
  Part of exon 21 of the human dystrophin transcript
aaaaauucaaagcauagcccugaaagagaaaggaca

SEQ ID NO: 705 - RNA, 33 nt, Artificial
  Part of exon 39 of the human dystrophin transcript
aaagaaucacagaugagagaaagcgagaggaaa

SEQ ID NO: 706 - RNA, 22 nt, Artificial
  Part of exon 21 of the human dystrophin transcript
agcccugaaagagaaaggacaa

SEQ ID NO: 707 - RNA, 21 nt, Artificial
  Part of exon 40 of the human dystrophin transcript
agcccagagaugaaaggaaaa

SEQ ID NO: 708 - RNA, 56 nt, Artificial
  Part of exon 21 of the human dystrophin transcript
aagcauagcccugaaagagaaaggacaaggacccauguuccuggaugcagacuuug

SEQ ID NO: 709 - RNA, 55 nt, Artificial
  Part of exon 41 of the human dystrophin transcript
aagcgcuggcgggaaauugagagcaaauuugcucaguuucgaagacucaacuuug

SEQ ID NO: 710 - RNA, 77 nt, Artificial
  Part of exon 21 of the human dystrophin transcript
agcccugaaagagaaaggacaaggacccauguuccuggaugcagacuuuguggccuuuacaaaucauuuuaagcaag

SEQ ID NO: 711 - RNA, 77 nt, Artificial
  Part of exon 42 of the human dystrophin transcript
agcccuauuagaaguggaacaacuucucaaugcuccugaccucugugcuaaggacuuugaagaucucuuuaagcaag

SEQ ID NO: 712 - RNA, 19 nt, Artificial
  Part of exon 21 of the human dystrophin transcript
acaaggacccauguuccug

SEQ ID NO: 713 - RNA, 19 nt, Artificial
  Part of exon 44 of the human dystrophin transcript
agaaagacacaaauuccug

SEQ ID NO: 714 - RNA, 56 nt, Artificial
  Part of exon 21 of the human dystrophin transcript
uuacaaaucauuuuaagcaagucuuuucugaugugcaggccagagagaaagagcua

SEQ ID NO: 715 - RNA, 58 nt, Artificial
  Part of exon 46 of the human dystrophin transcript
uuucaaagagauuuaaaugaauuuguuuuaugguuggaggaagcagauaacauugcua

SEQ ID NO: 716 - RNA, 17 nt, Artificial
  Part of exon 21 of the human dystrophin transcript
agcccugaaagagaaag

SEQ ID NO: 717 - RNA, 16 nt, Artificial
  Part of exon 47 of the human dystrophin transcript
agcccagaagagcaag

SEQ ID NO: 718 - RNA, 17 nt, Artificial
  Part of exon 21 of the human dystrophin transcript
uucaaccucaaauugaa

SEQ ID NO: 719 - RNA, 17 nt, Artificial
  Part of exon 48 of the human dystrophin transcript
uugaagcucaaauaaaa

SEQ ID NO: 720 - RNA, 16 nt, Artificial
  Part of exon 21 of the human dystrophin transcript
uggaugcagacuuugu

SEQ ID NO: 721 - RNA, 15 nt, Artificial
  Part of exon 49 of the human dystrophin transcript
uggaagagauuuugu

SEQ ID NO: 722 - RNA, 15 nt, Artificial
  Part of exon 21 of the human dystrophin transcript
ccauguuccuggaug

SEQ ID NO: 723 - RNA, 15 nt, Artificial
  Part of exon 51 of the human dystrophin transcript
ccaucuuccuugaug

SEQ ID NO: 724 - RNA, 50 nt, Artificial
  Part of exon 21 of the human dystrophin transcript
aauugaacgauuaaaaauucaaagcauagcccugaaagagaaaggacaag

SEQ ID NO: 725 - RNA, 49 nt, Artificial
  Part of exon 53 of the human dystrophin transcript
aaugaaauguuaaaggauucaacacaauggcuggaagcuaaggaagaag

SEQ ID NO: 726 - RNA, 38 nt, Artificial
  Part of exon 21 of the human dystrophin transcript
cccauguuccuggaugcagacuuuguggccuuuacaaa

SEQ ID NO: 727 - RNA, 38 nt, Artificial
  Part of exon 55 of the human dystrophin transcript
ccccuggaccuggaaaaguuucuugccuggcuuacaga

SEQ ID NO: 728 - RNA, 27 nt, Artificial
  Part of exon 21 of the human dystrophin transcript
gaugaagucaaccggcuaucaggucuu

SEQ ID NO: 729 - RNA, 27 nt, Artificial
  Part of exon 57 of the human dystrophin transcript
gaugaauuaagccggcaggcaccuauu

SEQ ID NO: 730 - RNA, 36 nt, Artificial
  Part of exon 21 of the human dystrophin transcript
ggccuuuacaaaucauuuuaagcaagucuuuucuga

SEQ ID NO: 731 - RNA, 37 nt, Artificial
  Part of exon 59 of the human dystrophin transcript
ggcuucuacgaaagcaggcugaggaggucaauacuga

SEQ ID NO: 732 - RNA, 15 nt, Artificial
  Part of exon 21 of the human dystrophin transcript
cccugaaagagaaag

SEQ ID NO: 733 - RNA, 15 nt, Artificial
  Part of exon 60 of the human dystrophin transcript
cucugaaagagaacg

SEQ ID NO: 734 - RNA, 26 nt, Artificial
  Part of exon 22 of the human dystrophin transcript
ggguccagcagucagaaaccaaacuc

SEQ ID NO: 735 - RNA, 24 nt, Artificial
  Part of exon 50 of the human dystrophin transcript
gggcaaagcagccugaccuagcuc

SEQ ID NO: 736 - RNA, 32 nt, Artificial
  Part of exon 22 of the human dystrophin transcript
caccaaugcgcuaucaggagaccaugagugcc

SEQ ID NO: 737 - RNA, 32 nt, Artificial
  Part of exon 52 of the human dystrophin transcript
caacaaugcaggauuuggaacagaggcguccc

SEQ ID NO: 738 - RNA, 16 nt, Artificial
  Part of exon 22 of the human dystrophin transcript
cgcuaucaggagacca

SEQ ID NO: 739 - RNA, 16 nt, Artificial
  Part of exon 58 of the human dystrophin transcript
cucuaccaggagccca

SEQ ID NO: 740 - RNA, 31 nt, Artificial
  Part of exon 23 of the human dystrophin transcript
aauaucaaucagaauuugaagaaauugaggg

SEQ ID NO: 741 - RNA, 31 nt, Artificial
  Part of exon 24 of the human dystrophin transcript
aaucacauacaaacccugaagaaauggaugg

SEQ ID NO: 742 - RNA, 30 nt, Artificial
  Part of exon 23 of the human dystrophin transcript
gaaauaucaaucagaauuugaagaaauuga

SEQ ID NO: 743 - RNA, 30 nt, Artificial
  Part of exon 25 of the human dystrophin transcript
gagacuugagacagaacucaaagaacuuaa

SEQ ID NO: 744 - RNA, 59 nt, Artificial
  Part of exon 23 of the human dystrophin transcript
cugaaauuagccggaaauaucaaucagaauuugaagaaauugagggacgcuggaagaag

SEQ ID NO: 745 - RNA, 60 nt, Artificial
  Part of exon 26 of the human dystrophin transcript
cuguaagccuccagaaagaucuaucagagaugcacgaauggaugacacaagcugaagaag

SEQ ID NO: 746 - RNA, 31 nt, Artificial
  Part of exon 23 of the human dystrophin transcript
cucagcaccacugugaaagagaugucgaaga

SEQ ID NO: 747 - RNA, 31 nt, Artificial
  Part of exon 27 of the human dystrophin transcript
cucugcacuaggcugaaugggaaaugcaaga

SEQ ID NO: 748 - RNA, 16 nt, Artificial
  Part of exon 23 of the human dystrophin transcript
agagcaacaaaguggc

SEQ ID NO: 749 - RNA, 16 nt, Artificial
  Part of exon 28 of the human dystrophin transcript
aaagcaaacaaguggc

SEQ ID NO: 750 - RNA, 43 nt, Artificial
  Part of exon 23 of the human dystrophin transcript
aucaaucagaauuugaagaaauugagggacgcuggaagaagcu

SEQ ID NO: 751 - RNA, 44 nt, Artificial
  Part of exon 29 of the human dystrophin transcript
aucaaugaggaacuugagacauuuaauucucguuggagggaacu

SEQ ID NO: 752 - RNA, 26 nt, Artificial
  Part of exon 23 of the human dystrophin transcript
aaauugagggacgcuggaagaagcuc

SEQ ID NO: 753 - RNA, 27 nt, Artificial
  Part of exon 30 of the human dystrophin transcript
auauugcagacaagguggacgcagcuc

SEQ ID NO: 754 - RNA, 26 nt, Artificial
  Part of exon 23 of the human dystrophin transcript
aucagaauuugaagaaauugagggac

SEQ ID NO: 755 - RNA, 25 nt, Artificial
  Part of exon 31 of the human dystrophin transcript
aucaguuuagaagaaaugaagaaac

SEQ ID NO: 756 - RNA, 25 nt, Artificial
  Part of exon 23 of the human dystrophin transcript
aguucucugcaagagcaacaaagug

SEQ ID NO: 757 - RNA, 25 nt, Artificial
  Part of exon 32 of the human dystrophin transcript
acuugccugcauuggaaacaaagag

SEQ ID NO: 758 - RNA, 36 nt, Artificial
  Part of exon 23 of the human dystrophin transcript
aaauuagccggaaauaucaaucagaauuugaagaaa

SEQ ID NO: 759 - RNA, 35 nt, Artificial
  Part of exon 33 of the human dystrophin transcript
aaagcagacggaaaaucccaaagaacuugaugaaa

SEQ ID NO: 760 - RNA, 138 nt, Artificial
  Part of exon 23 of the human dystrophin transcript
aagaaagcgcccucugaaauuagccggaaauaucaaucagaauuugaagaaauugagggacgcuggaagaagcucuccucccagcugguugagcauugucaaaagcuagaggagcaaaugaauaaacuccgaaaaauu

SEQ ID NO: 761 - RNA, 137 nt, Artificial
  Part of exon 34 of the human dystrophin transcript
aagaaagcaacaguuggagaaaugcuugaaauugucccguaagaugcgaaaggaaaugaaugucuugacagaauggcuggcagcuacagauauggaauugacaaagagaucagcaguugaaggaaugccuaguaauu

SEQ ID NO: 762 - RNA, 38 nt, Artificial
  Part of exon 23 of the human dystrophin transcript
ccacugugaaagagaugucgaagaaagcgcccucugaa

SEQ ID NO: 763 - RNA, 40 nt, Artificial
  Part of exon 35 of the human dystrophin transcript
cuacucaaaaagagauugagaaacagaaggugcaccugaa

SEQ ID NO: 764 - RNA, 72 nt, Artificial
  Part of exon 23 of the human dystrophin transcript
acaaaguggccuauacuaucucagcaccacugugaaagagaugucgaagaaagcgcccucugaaauuagccg

SEQ ID NO: 765 - RNA, 73 nt, Artificial
  Part of exon 36 of the human dystrophin transcript
acaaaguggaucauucaggcugacacacuuuuggaugaaucagagaaaaagaaaccccagcaaaaagaagacg

SEQ ID NO: 766 - RNA, 15 nt, Artificial
  Part of exon 23 of the human dystrophin transcript
auaucaaucagaauu

SEQ ID NO: 767 - RNA, 15 nt, Artificial
  Part of exon 37 of the human dystrophin transcript
auuucacacagaauu

SEQ ID NO: 768 - RNA, 13 nt, Artificial
  Part of exon 23 of the human dystrophin transcript
uuugaagaaauug

SEQ ID NO: 769 - RNA, 13 nt, Artificial
  Part of exon 38 of the human dystrophin transcript
uuugaaggaauug

SEQ ID NO: 770 - RNA, 26 nt, Artificial
  Part of exon 23 of the human dystrophin transcript
aaagcuagaggagcaaaugaauaaac

SEQ ID NO: 771 - RNA, 26 nt, Artificial
  Part of exon 39 of the human dystrophin transcript
aaagcgagaggaaauaaagauaaaac

SEQ ID NO: 772 - RNA, 78 nt, Artificial
  Part of exon 23 of the human dystrophin transcript
gaaauaucaaucagaauuugaagaaauugagggacgcuggaagaagcucuccucccagcugguugagcauugucaaaa

SEQ ID NO: 773 - RNA, 76 nt, Artificial
  Part of exon 40 of the human dystrophin transcript
gaaauuucucaucagugguaucaguacaagaggcaggcugaugaucuccugaaaugcuuggaugacauugaaaaaa

SEQ ID NO: 774 - RNA, 88 nt, Artificial
  Part of exon 23 of the human dystrophin transcript
auaucaaucagaauuugaagaaauugagggacgcuggaagaagcucuccucccagcugguugagcauugucaaaagcuagaggagcaa

SEQ ID NO: 775 - RNA, 87 nt, Artificial
  Part of exon 41 of the human dystrophin transcript
aaauugaucgggaauugcagaagaagaaagaggagcugaaugcagugcguaggcaagcugagggcuugucugaggauggggccgcaa

SEQ ID NO: 776 - RNA, 39 nt, Artificial
  Part of exon 23 of the human dystrophin transcript
acugugaaagagaugucgaagaaagcgcccucugaaauu

SEQ ID NO: 777 - RNA, 39 nt, Artificial
  Part of exon 42 of the human dystrophin transcript
acgaugauggugaugacugaagacaugccuuuggaaauu

SEQ ID NO: 778 - RNA, 59 nt, Artificial
  Part of exon 23 of the human dystrophin transcript
gaaauuagccggaaauaucaaucagaauuugaagaaauugagggacgcuggaagaagcu

SEQ ID NO: 779 - RNA, 58 nt, Artificial
  Part of exon 44 of the human dystrophin transcript
gaaauggcggcguuuucauuaugauauaaagauauuuaaucaguggcuaacagaagcu

SEQ ID NO: 780 - RNA, 36 nt, Artificial
  Part of exon 23 of the human dystrophin transcript
gcuagaggagcaaaugaauaaacuccgaaaaauuca

SEQ ID NO: 781 - RNA, 36 nt, Artificial
  Part of exon 46 of the human dystrophin transcript
gcuagaagaacaaaagaauaucuugucagaauuuca

SEQ ID NO: 782 - RNA, 38 nt, Artificial
  Part of exon 23 of the human dystrophin transcript
ggaaauaucaaucagaauuugaagaaauugagggacgc

SEQ ID NO: 783 - RNA, 36 nt, Artificial
  Part of exon 47 of the human dystrophin transcript
ggaauucucaaacaauuaaaugaaacuggaggaccc

SEQ ID NO: 784 - RNA, 85 nt, Artificial
  Part of exon 23 of the human dystrophin transcript
gaagaaauugagggacgcuggaagaagcucuccucccagcugguugagcauugucaaaagcuagaggagcaaaugaauaaacucc

SEQ ID NO: 785 - RNA, 82 nt, Artificial
  Part of exon 48 of the human dystrophin transcript
ggagaaauugaagcucaaauaaaagaccuugggcagcuugaaaaaaagcuugaagaccuugaagagcaguuaaaucaucugc

SEQ ID NO: 786 - RNA, 26 nt, Artificial
  Part of exon 23 of the human dystrophin transcript
ugugaaagagaugucgaagaaagcgc

SEQ ID NO: 787 - RNA, 26 nt, Artificial
  Part of exon 49 of the human dystrophin transcript
uguggaagagauuuugucuaaagggc

SEQ ID NO: 788 - RNA, 16 nt, Artificial
  Part of exon 23 of the human dystrophin transcript
uucucugcaagagcaa

SEQ ID NO: 789 - RNA, 16 nt, Artificial
  Part of exon 51 of the human dystrophin transcript
uucucugcuugaucaa

SEQ ID NO: 790 - RNA, 48 nt, Artificial
  Part of exon 23 of the human dystrophin transcript
gaaauaucaaucagaauuugaagaaauugagggacgcuggaagaagcu

SEQ ID NO: 791 - RNA, 48 nt, Artificial
  Part of exon 53 of the human dystrophin transcript
gaaauguuaaaggauucaacacaauggcuggaagcuaaggaagaagcu

SEQ ID NO: 792 - RNA, 91 nt, Artificial
  Part of exon 23 of the human dystrophin transcript
uuugaagaaauugagggacgcuggaagaagcucuccucccagcugguugagcauugucaaaagcuagaggagcaaaugaauaaacuccgaa

SEQ ID NO: 793 - RNA, 89 nt, Artificial
  Part of exon 55 of the human dystrophin transcript
uuggaagaaacucauagauuacugcaacaguucccccuggaccuggaaaaguuucuugccuggcuuacagaagcugaaacaacugccaa

SEQ ID NO: 794 - RNA, 14 nt, Artificial
  Part of exon 23 of the human dystrophin transcript
uucucugcaagagc

SEQ ID NO: 795 - RNA, 14 nt, Artificial
  Part of exon 57 of the human dystrophin transcript
uucucugcaggaac

SEQ ID NO: 796 - RNA, 66 nt, Artificial
  Part of exon 23 of the human dystrophin transcript
cuccucccagcugguugagcauugucaaaagcuagaggagcaaaugaauaaacuccgaaaaauuca

SEQ ID NO: 797 - RNA, 62 nt, Artificial
  Part of exon 59 of the human dystrophin transcript
cugcacuccgcugacuggcagagaaaaauagaugagacccuugaaagacuccaggaacuuca

SEQ ID NO: 798 - RNA, 20 nt, Artificial
  Part of exon 23 of the human dystrophin transcript
gaagaaagcgcccucugaaa

SEQ ID NO: 799 - RNA, 21 nt, Artificial
  Part of exon 60 of the human dystrophin transcript
ggagaaauugcgccucugaaa

SEQ ID NO: 800 - RNA, 34 nt, Artificial
  Part of exon 24 of the human dystrophin transcript
auucagaaauucuaaaaaagcagcugaaacagug

SEQ ID NO: 801 - RNA, 31 nt, Artificial
  Part of exon 25 of the human dystrophin transcript
auucagacaauucagcccagucuaaacagug

SEQ ID NO: 802 - RNA, 27 nt, Artificial
  Part of exon 24 of the human dystrophin transcript
ugaagaaauggauggcugaaguugaug

SEQ ID NO: 803 - RNA, 27 nt, Artificial
  Part of exon 26 of the human dystrophin transcript
ugcacgaauggaugacacaagcugaag

SEQ ID NO: 804 - RNA, 18 nt, Artificial
  Part of exon 24 of the human dystrophin transcript
uaaaaaagcagcugaaac

SEQ ID NO: 805 - RNA, 19 nt, Artificial
  Part of exon 27 of the human dystrophin transcript
uaaaaaaggaacuugaaac

SEQ ID NO: 806 - RNA, 50 nt, Artificial
  Part of exon 24 of the human dystrophin transcript
acauacaaacccugaagaaauggauggcugaaguugauguuuuucugaag

SEQ ID NO: 807 - RNA, 50 nt, Artificial
  Part of exon 28 of the human dystrophin transcript
acuuaaaaccacugaaaacauuccuggcggagcugaggaaaucucugagg

SEQ ID NO: 808 - RNA, 52 nt, Artificial
  Part of exon 24 of the human dystrophin transcript
acaaacccugaagaaauggauggcugaaguugauguuuuucugaaggaggaa

SEQ ID NO: 809 - RNA, 49 nt, Artificial
  Part of exon 29 of the human dystrophin transcript
acagacccuaacagauggcggagucauggaugagcuaaucaaugaggaa

SEQ ID NO: 810 - RNA, 21 nt, Artificial
  Part of exon 24 of the human dystrophin transcript
aaaagcagcugaaacagugca

SEQ ID NO: 811 - RNA, 21 nt, Artificial
  Part of exon 30 of the human dystrophin transcript
aaaaguugcuugaacagagca

SEQ ID NO: 812 - RNA, 17 nt, Artificial
  Part of exon 24 of the human dystrophin transcript
uggcugaaguugauguu

SEQ ID NO: 813 - RNA, 17 nt, Artificial
  Part of exon 31 of the human dystrophin transcript
ugucucagauugauguu

SEQ ID NO: 814 - RNA, 60 nt, Artificial
  Part of exon 24 of the human dystrophin transcript
ugaaggaggaauggccugcccuuggggauucagaaauucuaaaaaagcagcugaaacagu

SEQ ID NO: 815 - RNA, 57 nt, Artificial
  Part of exon 32 of the human dystrophin transcript
ugaagaugcacuugccugcauuggaaacaaagaguguggaacaggaaguaguacagu

SEQ ID NO: 816 - RNA, 51 nt, Artificial
  Part of exon 24 of the human dystrophin transcript
acccugaagaaauggauggcugaaguugauguuuuucugaaggaggaaugg

SEQ ID NO: 817 - RNA, 46 nt, Artificial
  Part of exon 33 of the human dystrophin transcript
aacuuguauaaaagucugagugaagugaagucugaaguggaaaugg

SEQ ID NO: 818 - RNA, 54 nt, Artificial
  Part of exon 24 of the human dystrophin transcript
gaauggccugcccuuggggauucagaaauucuaaaaaagcagcugaaacagugc

SEQ ID NO: 819 - RNA, 58 nt, Artificial
  Part of exon 34 of the human dystrophin transcript
gaauggcuggcagcuacagauauggaauugacaaagagaucagcaguugaaggaaugc

SEQ ID NO: 820 - RNA, 47 nt, Artificial
  Part of exon 24 of the human dystrophin transcript
agaaauggauggcugaaguugauguuuuucugaaggaggaauggccu

SEQ ID NO: 821 - RNA, 48 nt, Artificial
  Part of exon 35 of the human dystrophin transcript
agaaacagaaggugcaccugaagaguaucacagagguaggagaggccu

SEQ ID NO: 822 - RNA, 14 nt, Artificial
  Part of exon 24 of the human dystrophin transcript
aaucacauacaaac

SEQ ID NO: 823 - RNA, 14 nt, Artificial
  Part of exon 36 of the human dystrophin transcript
aaacacauggaaac

SEQ ID NO: 824 - RNA, 56 nt, Artificial
  Part of exon 24 of the human dystrophin transcript
acauacaaacccugaagaaauggauggcugaaguugauguuuuucugaaggaggaa

SEQ ID NO: 825 - RNA, 61 nt, Artificial
  Part of exon 38 of the human dystrophin transcript
acaaaaauugcuugaaccacuggaggcugaaauucagcagggggugaaucugaaagaggaa

SEQ ID NO: 826 - RNA, 20 nt, Artificial
  Part of exon 24 of the human dystrophin transcript
uaaaaaagcagcugaaacag

SEQ ID NO: 827 - RNA, 20 nt, Artificial
  Part of exon 39 of the human dystrophin transcript
uaaaacagcagcuguuacag

SEQ ID NO: 828 - RNA, 21 nt, Artificial
  Part of exon 24 of the human dystrophin transcript
gaaauggauggcugaaguuga

SEQ ID NO: 829 - RNA, 21 nt, Artificial
  Part of exon 40 of the human dystrophin transcript
gaaaugcuuggaugacauuga

SEQ ID NO: 830 - RNA, 21 nt, Artificial
  Part of exon 24 of the human dystrophin transcript
aaaaagcagcugaaacagugc

SEQ ID NO: 831 - RNA, 22 nt, Artificial
  Part of exon 41 of the human dystrophin transcript
aaagaggagcugaaugcagugc

SEQ ID NO: 832 - RNA, 26 nt, Artificial
  Part of exon 24 of the human dystrophin transcript
cauacaaacccugaagaaauggaugg

SEQ ID NO: 833 - RNA, 28 nt, Artificial
  Part of exon 42 of the human dystrophin transcript
cacacuguccgugaagaaacgaugaugg

SEQ ID NO: 834 - RNA, 55 nt, Artificial
  Part of exon 24 of the human dystrophin transcript
aucacauacaaacccugaagaaauggauggcugaaguugauguuuuucugaagga

SEQ ID NO: 835 - RNA, 57 nt, Artificial
  Part of exon 44 of the human dystrophin transcript
augauauaaagauauuuaaucaguggcuaacagaagcugaacaguuucucagaaaga

SEQ ID NO: 836 - RNA, 19 nt, Artificial
  Part of exon 24 of the human dystrophin transcript
auggauggcugaaguugau

SEQ ID NO: 837 - RNA, 19 nt, Artificial
  Part of exon 46 of the human dystrophin transcript
augguuggaggaagcagau

SEQ ID NO: 838 - RNA, 66 nt, Artificial
  Part of exon 24 of the human dystrophin transcript
uuucugaaggaggaauggccugcccuuggggauucagaaauucuaaaaaagcagcugaaacagugc

SEQ ID NO: 839 - RNA, 70 nt, Artificial
  Part of exon 47 of the human dystrophin transcript
uuacugguggaagaguugccccugcgccagggaauucucaaacaauuaaaugaaacuggaggacccgugc

SEQ ID NO: 840 - RNA, 26 nt, Artificial
  Part of exon 24 of the human dystrophin transcript
gaaauucuaaaaaagcagcugaaaca

SEQ ID NO: 841 - RNA, 26 nt, Artificial
  Part of exon 48 of the human dystrophin transcript
gaagaccuugaagagcaguuaaauca

SEQ ID NO: 842 - RNA, 40 nt, Artificial
  Part of exon 24 of the human dystrophin transcript
cugaagaaauggauggcugaaguugauguuuuucugaagg

SEQ ID NO: 843 - RNA, 37 nt, Artificial
  Part of exon 49 of the human dystrophin transcript
cuaaacaaccggauguggaagagauuuugucuaaagg

SEQ ID NO: 844 - RNA, 34 nt, Artificial
  Part of exon 24 of the human dystrophin transcript
ugcccuuggggauucagaaauucuaaaaaagcag

SEQ ID NO: 845 - RNA, 37 nt, Artificial
  Part of exon 51 of the human dystrophin transcript
ugaccuugaggauaucaacgagaugaucaucaagcag

SEQ ID NO: 846 - RNA, 56 nt, Artificial
  Part of exon 24 of the human dystrophin transcript
aaucacauacaaacccugaagaaauggauggcugaaguugauguuuuucugaagga

SEQ ID NO: 847 - RNA, 55 nt, Artificial
  Part of exon 53 of the human dystrophin transcript
aaguacaagaacaccuucagaaccggaggcaacaguugaaugaaauguuaaagga

SEQ ID NO: 848 - RNA, 55 nt, Artificial
  Part of exon 24 of the human dystrophin transcript
aggaauggccugcccuuggggauucagaaauucuaaaaaagcagcugaaacagug

SEQ ID NO: 849 - RNA, 52 nt, Artificial
  Part of exon 55 of the human dystrophin transcript
aggaaaggcuccuagaagacuccaagggaguaaaagagcugaugaaacaaug

SEQ ID NO: 850 - RNA, 61 nt, Artificial
  Part of exon 24 of the human dystrophin transcript
uucugaaggaggaauggccugcccuuggggauucagaaauucuaaaaaagcagcugaaaca

SEQ ID NO: 851 - RNA, 66 nt, Artificial
  Part of exon 57 of the human dystrophin transcript
uucugaccaguggaagcgucugcaccuuucucugcaggaacuucugguguggcuacagcugaaaga

SEQ ID NO: 852 - RNA, 18 nt, Artificial
  Part of exon 24 of the human dystrophin transcript
uucuaaaaaagcagcuga

SEQ ID NO: 853 - RNA, 19 nt, Artificial
  Part of exon 59 of the human dystrophin transcript
uucuacgaaagcaggcuga

SEQ ID NO: 854 - RNA, 43 nt, Artificial
  Part of exon 25 of the human dystrophin transcript
cuugagacagaacucaaagaacuuaacacucagugggaucaca

SEQ ID NO: 855 - RNA, 41 nt, Artificial
  Part of exon 26 of the human dystrophin transcript
cuugagagagauuuugaauauaaaacuccagaugaauuaca

SEQ ID NO: 856 - RNA, 16 nt, Artificial
  Part of exon 25 of the human dystrophin transcript
aaagaacuuaacacuc

SEQ ID NO: 857 - RNA, 16 nt, Artificial
  Part of exon 27 of the human dystrophin transcript
aaggaacuugaaacuc

SEQ ID NO: 858 - RNA, 34 nt, Artificial
  Part of exon 25 of the human dystrophin transcript
agaguuugcuucgagacuugagacagaacucaaa

SEQ ID NO: 859 - RNA, 34 nt, Artificial
  Part of exon 29 of the human dystrophin transcript
aaaauuugaugcgacauucagaggauaacccaaa

SEQ ID NO: 860 - RNA, 43 nt, Artificial
  Part of exon 25 of the human dystrophin transcript
gcuucgagacuugagacagaacucaaagaacuuaacacucagu

SEQ ID NO: 861 - RNA, 43 nt, Artificial
  Part of exon 30 of the human dystrophin transcript
gcauccagucugcccaggagacugaaaaauccuuacacuuaau

SEQ ID NO: 862 - RNA, 39 nt, Artificial
  Part of exon 25 of the human dystrophin transcript
acuugagacagaacucaaagaacuuaacacucaguggga

SEQ ID NO: 863 - RNA, 35 nt, Artificial
  Part of exon 31 of the human dystrophin transcript
aguuuagaagaaaugaagaaacauaaucaggggaa

SEQ ID NO: 864 - RNA, 65 nt, Artificial
  Part of exon 25 of the human dystrophin transcript
uauucagacaauucagcccagucuaaacagugucaaugaaggugggcagaagauaaagaaugaag

SEQ ID NO: 865 - RNA, 63 nt, Artificial
  Part of exon 32 of the human dystrophin transcript
uauuccagaaaccagccaauuuugagcagcgucuacaagaaaguaagaugauuuuagaugaag

SEQ ID NO: 866 - RNA, 78 nt, Artificial
  Part of exon 25 of the human dystrophin transcript
ugaaggugggcagaagauaaagaaugaagcagagccagaguuugcuucgagacuugagacagaacucaaagaacuuaa

SEQ ID NO: 867 - RNA, 75 nt, Artificial
  Part of exon 33 of the human dystrophin transcript
ugaaguggaaauggugauaaagacuggacgucagauuguacagaaaaagcagacggaaaaucccaaagaacuuga

SEQ ID NO: 868 - RNA, 19 nt, Artificial
  Part of exon 25 of the human dystrophin transcript
aagauaaagaaugaagcag

SEQ ID NO: 869 - RNA, 19 nt, Artificial
  Part of exon 34 of the human dystrophin transcript
aacagaaagaaagcaacag

SEQ ID NO: 870 - RNA, 18 nt, Artificial
  Part of exon 25 of the human dystrophin transcript
aggugggcagaagauaaa

SEQ ID NO: 871 - RNA, 18 nt, Artificial
  Part of exon 35 of the human dystrophin transcript
acguugguggaagauaaa

SEQ ID NO: 872 - RNA, 19 nt, Artificial
  Part of exon 25 of the human dystrophin transcript
gaaugaagcagagccagag

SEQ ID NO: 873 - RNA, 19 nt, Artificial
  Part of exon 36 of the human dystrophin transcript
ggaugaaucagagaaaaag

SEQ ID NO: 874 - RNA, 42 nt, Artificial
  Part of exon 25 of the human dystrophin transcript
cagugauauucagacaauucagcccagucuaaacagugucaa

SEQ ID NO: 875 - RNA, 41 nt, Artificial
  Part of exon 37 of the human dystrophin transcript
caucgauuugcagccauuucacacagaauuaagacuggaaa

SEQ ID NO: 876 - RNA, 31 nt, Artificial
  Part of exon 25 of the human dystrophin transcript
cagaguuugcuucgagacuugagacagaacu

SEQ ID NO: 877 - RNA, 32 nt, Artificial
  Part of exon 38 of the human dystrophin transcript
caaaaauugcuugaaccacuggaggcugaaau

SEQ ID NO: 878 - RNA, 69 nt, Artificial
  Part of exon 25 of the human dystrophin transcript
auucagacaauucagcccagucuaaacagugucaaugaaggugggcagaagauaaagaaugaagcagag

SEQ ID NO: 879 - RNA, 69 nt, Artificial
  Part of exon 39 of the human dystrophin transcript
augaagacaaugaggguacuguaaaagaauuguugcaaagaggagacaacuuacaacaaagaaucacag

SEQ ID NO: 880 - RNA, 37 nt, Artificial
  Part of exon 25 of the human dystrophin transcript
agacagaacucaaagaacuuaacacucagugggauca

SEQ ID NO: 881 - RNA, 38 nt, Artificial
  Part of exon 40 of the human dystrophin transcript
agaaaaaaggcucuagaaauuucucaucagugguauca

SEQ ID NO: 882 - RNA, 40 nt, Artificial
  Part of exon 25 of the human dystrophin transcript
gugauauucagacaauucagcccagucuaaacagugucaa

SEQ ID NO: 883 - RNA, 40 nt, Artificial
  Part of exon 41 of the human dystrophin transcript
gggaaauugagagcaaauuugcucaguuucgaagacucaa

SEQ ID NO: 884 - RNA, 39 nt, Artificial
  Part of exon 25 of the human dystrophin transcript
acagugucaaugaaggugggcagaagauaaagaaugaag

SEQ ID NO: 885 - RNA, 39 nt, Artificial
  Part of exon 42 of the human dystrophin transcript
acacuguccgugaagaaacgaugauggugaugacugaag

SEQ ID NO: 886 - RNA, 74 nt, Artificial
  Part of exon 25 of the human dystrophin transcript
ucuaaacagugucaaugaaggugggcagaagauaaagaaugaagcagagccagaguuugcuucgagacuugaga

SEQ ID NO: 887 - RNA, 75 nt, Artificial
  Part of exon 44 of the human dystrophin transcript
uauaaagauauuuaaucaguggcuaacagaagcugaacaguuucucagaaagacacaaauuccugagaauuggga

SEQ ID NO: 888 - RNA, 21 nt, Artificial
  Part of exon 25 of the human dystrophin transcript
gacagaacucaaagaacuuaa

SEQ ID NO: 889 - RNA, 23 nt, Artificial
  Part of exon 46 of the human dystrophin transcript
gucagaauuucaaagagauuuaa

SEQ ID NO: 890 - RNA, 32 nt, Artificial
  Part of exon 25 of the human dystrophin transcript
cagcccagucuaaacagugucaaugaaggugg

SEQ ID NO: 891 - RNA, 32 nt, Artificial
  Part of exon 47 of the human dystrophin transcript
cagggaauucucaaacaauuaaaugaaacugg

SEQ ID NO: 892 - RNA, 45 nt, Artificial
  Part of exon 25 of the human dystrophin transcript
cuugagacagaacucaaagaacuuaacacucagugggaucacaug

SEQ ID NO: 893 - RNA, 45 nt, Artificial
  Part of exon 48 of the human dystrophin transcript
cuugaaaaaaagcuugaagaccuugaagagcaguuaaaucaucug

SEQ ID NO: 894 - RNA, 16 nt, Artificial
  Part of exon 25 of the human dystrophin transcript
cagcccagucuaaaca

SEQ ID NO: 895 - RNA, 16 nt, Artificial
  Part of exon 49 of the human dystrophin transcript
caguucaagcuaaaca

SEQ ID NO: 896 - RNA, 34 nt, Artificial
  Part of exon 25 of the human dystrophin transcript
aguuugcuucgagacuugagacagaacucaaaga

SEQ ID NO: 897 - RNA, 33 nt, Artificial
  Part of exon 51 of the human dystrophin transcript
agauuucaaccgggcuuggacagaacuuaccga

SEQ ID NO: 898 - RNA, 28 nt, Artificial
  Part of exon 25 of the human dystrophin transcript
ucaaagaacuuaacacucagugggauca

SEQ ID NO: 899 - RNA, 27 nt, Artificial
  Part of exon 53 of the human dystrophin transcript
ugaaagaauucagaaucagugggauga

SEQ ID NO: 900 - RNA, 39 nt, Artificial
  Part of exon 25 of the human dystrophin transcript
agaguuugcuucgagacuugagacagaacucaaagaacu

SEQ ID NO: 901 - RNA, 37 nt, Artificial
  Part of exon 55 of the human dystrophin transcript
aaaguuucuugccuggcuuacagaagcugaaacaacu

SEQ ID NO: 902 - RNA, 19 nt, Artificial
  Part of exon 25 of the human dystrophin transcript
aagauaaagaaugaagcag

SEQ ID NO: 903 - RNA, 19 nt, Artificial
  Part of exon 57 of the human dystrophin transcript
aagaugaugaauuaagccg

SEQ ID NO: 904 - RNA, 75 nt, Artificial
  Part of exon 25 of the human dystrophin transcript
agagccagaguuugcuucgagacuugagacagaacucaaagaacuuaacacucagugggaucacaugugccaaca

SEQ ID NO: 905 - RNA, 77 nt, Artificial
  Part of exon 59 of the human dystrophin transcript
agagcccagaaugucacucggcuucuacgaaagcaggcugaggaggucaauacugagugggaaaaauugaaccugca

SEQ ID NO: 906 - RNA, 79 nt, Artificial
  Part of exon 26 of the human dystrophin transcript
agcugaagaagaguaucuugagagagauuuugaauauaaaacuccagaugaauuacagaaagcaguugaagagaugaag

SEQ ID NO: 907 - RNA, 77 nt, Artificial
  Part of exon 27 of the human dystrophin transcript
agcuaaagaagaggcccaacaaaaagaagcgaaagugaaacuccuuacugagucuguaaauagugucauagcucaag

SEQ ID NO: 908 - RNA, 57 nt, Artificial
  Part of exon 26 of the human dystrophin transcript
ugagagagauuuugaauauaaaacuccagaugaauuacagaaagcaguugaagagau

SEQ ID NO: 909 - RNA, 57 nt, Artificial
  Part of exon 28 of the human dystrophin transcript
ugaaguagaauuuaaacuuaaaaccacugaaaacauuccuggcggagcugaggaaau

SEQ ID NO: 910 - RNA, 54 nt, Artificial
  Part of exon 26 of the human dystrophin transcript
cuaucagagaugcacgaauggaugacacaagcugaagaagaguaucuugagaga

SEQ ID NO: 911 - RNA, 51 nt, Artificial
  Part of exon 29 of the human dystrophin transcript
cuaacagauggcggagucauggaugagcuaaucaaugaggaacuugagaca

SEQ ID NO: 912 - RNA, 22 nt, Artificial
  Part of exon 26 of the human dystrophin transcript
gaaagcaguugaagagaugaag

SEQ ID NO: 913 - RNA, 24 nt, Artificial
  Part of exon 31 of the human dystrophin transcript
gagaucaguuuagaagaaaugaag

SEQ ID NO: 914 - RNA, 75 nt, Artificial
  Part of exon 26 of the human dystrophin transcript
uaugccagaaaggaggccuugaagggagguuuggagaaaacuguaagccuccagaaagaucuaucagagaugcac

SEQ ID NO: 915 - RNA, 74 nt, Artificial
  Part of exon 32 of the human dystrophin transcript
uauuccagaaaccagccaauuuugagcagcgucuacaagaaaguaagaugauuuuagaugaagugaagaugcac

SEQ ID NO: 916 - RNA, 43 nt, Artificial
  Part of exon 26 of the human dystrophin transcript
uauaaaacuccagaugaauuacagaaagcaguugaagagauga

SEQ ID NO: 917 - RNA, 43 nt, Artificial
  Part of exon 33 of the human dystrophin transcript
uauaaaagucugagugaagugaagucugaaguggaaaugguga

SEQ ID NO: 918 - RNA, 100 nt, Artificial
  Part of exon 26 of the human dystrophin transcript
agagaugcacgaauggaugacacaagcugaagaagaguaucuugagagagauuuugaauauaaaacuccagaugaauuacagaaagcaguugaagagaug

SEQ ID NO: 919 - RNA, 110 nt, Artificial
  Part of exon 34 of the human dystrophin transcript
agaaaugcuugaaauugucccguaagaugcgaaaggaaaugaaugucuugacagaauggcuggcagcuacagauauggaauugacaaagagaucagcaguugaaggaaug

SEQ ID NO: 920 - RNA, 55 nt, Artificial
  Part of exon 26 of the human dystrophin transcript
gaggccuugaagggagguuuggagaaaacuguaagccuccagaaagaucuaucag

SEQ ID NO: 921 - RNA, 56 nt, Artificial
  Part of exon 35 of the human dystrophin transcript
gaggccuugaaaacaguuuugggcaagaaggagacguugguggaagauaaacucag

SEQ ID NO: 922 - RNA, 78 nt, Artificial
  Part of exon 26 of the human dystrophin transcript
aagggagguuuggagaaaacuguaagccuccagaaagaucuaucagagaugcacgaauggaugacacaagcugaagaa

SEQ ID NO: 923 - RNA, 86 nt, Artificial
  Part of exon 36 of the human dystrophin transcript
auggaaacuuuugaccagaauguggaccacaucacaaaguggaucauucaggcugacacacuuuuggaugaaucagagaaaaagaa

SEQ ID NO: 924 - RNA, 29 nt, Artificial
  Part of exon 26 of the human dystrophin transcript
agaugcacgaauggaugacacaagcugaa

SEQ ID NO: 925 - RNA, 29 nt, Artificial
  Part of exon 37 of the human dystrophin transcript
aaaggcagaacugaaugacauacgcccaa

SEQ ID NO: 926 - RNA, 88 nt, Artificial
  Part of exon 26 of the human dystrophin transcript
ucagagaugcacgaauggaugacacaagcugaagaagaguaucuugagagagauuuugaauauaaaacuccagaugaauuacagaaag

SEQ ID NO: 927 - RNA, 82 nt, Artificial
  Part of exon 38 of the human dystrophin transcript
ucagauauacaaaaauugcuugaaccacuggaggcugaaauucagcagggggugaaucugaaagaggaagacuucaauaaag

SEQ ID NO: 928 - RNA, 42 nt, Artificial
  Part of exon 26 of the human dystrophin transcript
gagagagauuuugaauauaaaacuccagaugaauuacagaaa

SEQ ID NO: 929 - RNA, 40 nt, Artificial
  Part of exon 39 of the human dystrophin transcript
gcgagaggaaauaaagauaaaacagcagcuguuacagaca

SEQ ID NO: 930 - RNA, 73 nt, Artificial
  Part of exon 26 of the human dystrophin transcript
gagguuuggagaaaacuguaagccuccagaaagaucuaucagagaugcacgaauggaugacacaagcugaaga

SEQ ID NO: 931 - RNA, 72 nt, Artificial
  Part of exon 40 of the human dystrophin transcript
gaggucucaaagaagaaaaaaggcucuagaaauuucucaucagugguaucaguacaagaggcaggcugauga

SEQ ID NO: 932 - RNA, 29 nt, Artificial
  Part of exon 26 of the human dystrophin transcript
gaauuacagaaagcaguugaagagaugaa

SEQ ID NO: 933 - RNA, 29 nt, Artificial
  Part of exon 41 of the human dystrophin transcript
gaauugcagaagaagaaagaggagcugaa

SEQ ID NO: 934 - RNA, 19 nt, Artificial
  Part of exon 26 of the human dystrophin transcript
uuuggagaaaacuguaagc

SEQ ID NO: 935 - RNA, 19 nt, Artificial
  Part of exon 42 of the human dystrophin transcript
uuugaagaucucuuuaagc

SEQ ID NO: 936 - RNA, 90 nt, Artificial
  Part of exon 26 of the human dystrophin transcript
agguuuggagaaaacuguaagccuccagaaagaucuaucagagaugcacgaauggaugacacaagcugaagaagaguaucuugagagaga

SEQ ID NO: 937 - RNA, 88 nt, Artificial
  Part of exon 44 of the human dystrophin transcript
agaucuguugagaaauggcggcguuuucauuaugauauaaagauauuuaaucaguggcuaacagaagcugaacaguuucucagaaaga

SEQ ID NO: 938 - RNA, 48 nt, Artificial
  Part of exon 26 of the human dystrophin transcript
agaagaguaucuugagagagauuuugaauauaaaacuccagaugaauu

SEQ ID NO: 939 - RNA, 43 nt, Artificial
  Part of exon 46 of the human dystrophin transcript
aaaagaauaucuugucagaauuucaaagagauuuaaaugaauu

SEQ ID NO: 940 - RNA, 59 nt, Artificial
  Part of exon 26 of the human dystrophin transcript
augacacaagcugaagaagaguaucuugagagagauuuugaauauaaaacuccagauga

SEQ ID NO: 941 - RNA, 61 nt, Artificial
  Part of exon 47 of the human dystrophin transcript
auaagcccagaagagcaagauaaacuugaaaauaagcucaagcagacaaaucuccagugga

SEQ ID NO: 942 - RNA, 110 nt, Artificial
  Part of exon 26 of the human dystrophin transcript
uccagaaagaucuaucagagaugcacgaauggaugacacaagcugaagaagaguaucuugagagagauuuugaauauaaaacuccagaugaauuacagaaagcaguugaa

SEQ ID NO: 943 - RNA, 98 nt, Artificial
  Part of exon 48 of the human dystrophin transcript
uccagagcuuuaccugagaaacaaggagaaauugaagcucaaauaaaagaccuugggcagcuugaaaaaaagcuugaagaccuugaagagcaguuaaa

SEQ ID NO: 944 - RNA, 67 nt, Artificial
  Part of exon 26 of the human dystrophin transcript
caagcugaagaagaguaucuugagagagauuuugaauauaaaacuccagaugaauuacagaaagcag

SEQ ID NO: 945 - RNA, 67 nt, Artificial
  Part of exon 49 of the human dystrophin transcript
caagcuaaacaaccggauguggaagagauuuugucuaaagggcagcauuuguacaaggaaaaaccag

SEQ ID NO: 946 - RNA, 60 nt, Artificial
  Part of exon 26 of the human dystrophin transcript
augacacaagcugaagaagaguaucuugagagagauuuugaauauaaaacuccagaugaa

SEQ ID NO: 947 - RNA, 60 nt, Artificial
  Part of exon 51 of the human dystrophin transcript
aucacagagggugauggugggugaccuugaggauaucaacgagaugaucaucaagcagaa

SEQ ID NO: 948 - RNA, 46 nt, Artificial
  Part of exon 26 of the human dystrophin transcript
ugaauauaaaacuccagaugaauuacagaaagcaguugaagagaug

SEQ ID NO: 949 - RNA, 49 nt, Artificial
  Part of exon 53 of the human dystrophin transcript
ugaaguacaagaacaccuucagaaccggaggcaacaguugaaugaaaug

SEQ ID NO: 950 - RNA, 89 nt, Artificial
  Part of exon 26 of the human dystrophin transcript
gaaaggaggccuugaagggagguuuggagaaaacuguaagccuccagaaagaucuaucagagaugcacgaauggaugacacaagcugaa

SEQ ID NO: 951 - RNA, 89 nt, Artificial
  Part of exon 55 of the human dystrophin transcript
gagaggcugcuuuggaagaaacucauagauuacugcaacaguucccccuggaccuggaaaaguuucuugccuggcuuacagaagcugaa

SEQ ID NO: 952 - RNA, 19 nt, Artificial
  Part of exon 26 of the human dystrophin transcript
gaugaauuacagaaagcag

SEQ ID NO: 953 - RNA, 18 nt, Artificial
  Part of exon 57 of the human dystrophin transcript
gaugaauuaagccggcag

SEQ ID NO: 954 - RNA, 76 nt, Artificial
  Part of exon 26 of the human dystrophin transcript
caagcugaagaagaguaucuugagagagauuuugaauauaaaacuccagaugaauuacagaaagcaguugaagaga

SEQ ID NO: 955 - RNA, 76 nt, Artificial
  Part of exon 59 of the human dystrophin transcript
caggcugaggaggucaauacugagugggaaaaauugaaccugcacuccgcugacuggcagagaaaaauagaugaga

SEQ ID NO: 956 - RNA, 39 nt, Artificial
  Part of exon 27 of the human dystrophin transcript
acaagaggccuuaaaaaaggaacuugaaacucuaaccac

SEQ ID NO: 957 - RNA, 40 nt, Artificial
  Part of exon 28 of the human dystrophin transcript
acaaguggcuaaaugaaguagaauuuaaacuuaaaaccac

SEQ ID NO: 958 - RNA, 19 nt, Artificial
  Part of exon 27 of the human dystrophin transcript
uaaaaaaggaacuugaaac

SEQ ID NO: 959 - RNA, 19 nt, Artificial
  Part of exon 29 of the human dystrophin transcript
ucaaugaggaacuugagac

SEQ ID NO: 960 - RNA, 24 nt, Artificial
  Part of exon 27 of the human dystrophin transcript
agcucaagcuccaccuguagcaca

SEQ ID NO: 961 - RNA, 24 nt, Artificial
  Part of exon 30 of the human dystrophin transcript
agcucaaaugccucaggaagccca

SEQ ID NO: 962 - RNA, 72 nt, Artificial
  Part of exon 27 of the human dystrophin transcript
aaaagaagcgaaagugaaacuccuuacugagucuguaaauagugucauagcucaagcuccaccuguagcaca

SEQ ID NO: 963 - RNA, 67 nt, Artificial
  Part of exon 31 of the human dystrophin transcript
aaaugaagaaacauaaucaggggaaggaggcugcccaaagaguccugucucagauugauguugcaca

SEQ ID NO: 964 - RNA, 44 nt, Artificial
  Part of exon 27 of the human dystrophin transcript
aguggcucugcacuaggcugaaugggaaaugcaagacuuuggaa

SEQ ID NO: 965 - RNA, 43 nt, Artificial
  Part of exon 32 of the human dystrophin transcript
agugaagaugcacuugccugcauuggaaacaaagaguguggaa

SEQ ID NO: 966 - RNA, 63 nt, Artificial
  Part of exon 27 of the human dystrophin transcript
uguaaauagugucauagcucaagcuccaccuguagcacaagaggccuuaaaaaaggaacuuga

SEQ ID NO: 967 - RNA, 70 nt, Artificial
  Part of exon 33 of the human dystrophin transcript
uggaaauggugauaaagacuggacgucagauuguacagaaaaagcagacggaaaaucccaaagaacuuga

SEQ ID NO: 968 - RNA, 30 nt, Artificial
  Part of exon 27 of the human dystrophin transcript
aagaagcgaaagugaaacuccuuacugagu

SEQ ID NO: 969 - RNA, 34 nt, Artificial
  Part of exon 34 of the human dystrophin transcript
aagaugcgaaaggaaaugaaugucuugacagaau

SEQ ID NO: 970 - RNA, 59 nt, Artificial
  Part of exon 27 of the human dystrophin transcript
acugagucuguaaauagugucauagcucaagcuccaccuguagcacaagaggccuuaaa

SEQ ID NO: 971 - RNA, 60 nt, Artificial
  Part of exon 35 of the human dystrophin transcript
acucagucuucugaauaguaacuggauagcugucaccucccgagcagaagagugguuaaa

SEQ ID NO: 972 - RNA, 31 nt, Artificial
  Part of exon 27 of the human dystrophin transcript
agagcuaaagaagaggcccaacaaaaagaag

SEQ ID NO: 973 - RNA, 29 nt, Artificial
  Part of exon 36 of the human dystrophin transcript
agagaaaaagaaaccccagcaaaaagaag

SEQ ID NO: 974 - RNA, 29 nt, Artificial
  Part of exon 27 of the human dystrophin transcript
agugucauagcucaagcuccaccuguagc

SEQ ID NO: 975 - RNA, 30 nt, Artificial
  Part of exon 37 of the human dystrophin transcript
aaucucagagcucaaccaucgauuugcagc

SEQ ID NO: 976 - RNA, 24 nt, Artificial
  Part of exon 27 of the human dystrophin transcript
ggcugaaugggaaaugcaagacuu

SEQ ID NO: 977 - RNA, 25 nt, Artificial
  Part of exon 38 of the human dystrophin transcript
gggugaaucugaaagaggaagacuu

SEQ ID NO: 978 - RNA, 36 nt, Artificial
  Part of exon 27 of the human dystrophin transcript
aaagaagaggcccaacaaaaagaagcgaaagugaaa

SEQ ID NO: 979 - RNA, 39 nt, Artificial
  Part of exon 39 of the human dystrophin transcript
aaagaggagacaacuuacaacaaagaaucacagaugaga

SEQ ID NO: 980 - RNA, 26 nt, Artificial
  Part of exon 27 of the human dystrophin transcript
aaaaaaggaacuugaaacucuaacca

SEQ ID NO: 981 - RNA, 27 nt, Artificial
  Part of exon 40 of the human dystrophin transcript
aaaaaaggcucuagaaauuucucauca

SEQ ID NO: 982 - RNA, 15 nt, Artificial
  Part of exon 27 of the human dystrophin transcript
ugaaugggaaaugca

SEQ ID NO: 983 - RNA, 15 nt, Artificial
  Part of exon 41 of the human dystrophin transcript
ugaucgggaauugca

SEQ ID NO: 984 - RNA, 77 nt, Artificial
  Part of exon 27 of the human dystrophin transcript
gaaacuccuuacugagucuguaaauagugucauagcucaagcuccaccuguagcacaagaggccuuaaaaaaggaac

SEQ ID NO: 985 - RNA, 73 nt, Artificial
  Part of exon 42 of the human dystrophin transcript
gaaauuucuuaugugccuucuacuuauuugacugaaaucacucaugucucacaagcccuauuagaaguggaac

SEQ ID NO: 986 - RNA, 31 nt, Artificial
  Part of exon 27 of the human dystrophin transcript
ucuguaaauagugucauagcucaagcuccac

SEQ ID NO: 987 - RNA, 30 nt, Artificial
  Part of exon 44 of the human dystrophin transcript
uauuuaaucaguggcuaacagaagcugaac

SEQ ID NO: 988 - RNA, 43 nt, Artificial
  Part of exon 27 of the human dystrophin transcript
agcuaaagaagaggcccaacaaaaagaagcgaaagugaaacuc

SEQ ID NO: 989 - RNA, 43 nt, Artificial
  Part of exon 46 of the human dystrophin transcript
accuggaaaagagcagcaacuaaaagaaaagcuugagcaaguc

SEQ ID NO: 990 - RNA, 18 nt, Artificial
  Part of exon 27 of the human dystrophin transcript
agaagcgaaagugaaacu

SEQ ID NO: 991 - RNA, 18 nt, Artificial
  Part of exon 47 of the human dystrophin transcript
agaagagcaagauaaacu

SEQ ID NO: 992 - RNA, 64 nt, Artificial
  Part of exon 27 of the human dystrophin transcript
agagcuaaagaagaggcccaacaaaaagaagcgaaagugaaacuccuuacugagucuguaaaua

SEQ ID NO: 993 - RNA, 67 nt, Artificial
  Part of exon 48 of the human dystrophin transcript
agagcuuuaccugagaaacaaggagaaauugaagcucaaauaaaagaccuugggcagcuugaaaaaa

SEQ ID NO: 994 - RNA, 40 nt, Artificial
  Part of exon 27 of the human dystrophin transcript
agcuaaagaagaggcccaacaaaaagaagcgaaagugaaa

SEQ ID NO: 995 - RNA, 40 nt, Artificial
  Part of exon 49 of the human dystrophin transcript
aacugaaauagcaguucaagcuaaacaaccggauguggaa

SEQ ID NO: 996 - RNA, 38 nt, Artificial
  Part of exon 27 of the human dystrophin transcript
uuaaaaaaggaacuugaaacucuaaccaccaacuacca

SEQ ID NO: 997 - RNA, 38 nt, Artificial
  Part of exon 51 of the human dystrophin transcript
uuacuaaggaaacugccaucuccaaacuagaaaugcca

SEQ ID NO: 998 - RNA, 21 nt, Artificial
  Part of exon 27 of the human dystrophin transcript
agcuaaagaagaggcccaaca

SEQ ID NO: 999 - RNA, 21 nt, Artificial
  Part of exon 53 of the human dystrophin transcript
agcuaaggaagaagcugagca

SEQ ID NO: 1000 - RNA, 48 nt, Artificial
  Part of exon 27 of the human dystrophin transcript
accaacuaccaguggcucugcacuaggcugaaugggaaaugcaagacu

SEQ ID NO: 1001 - RNA, 45 nt, Artificial
  Part of exon 55 of the human dystrophin transcript
aacaacugccaauguccuacaggaugcuacccguaaggaaaggcu

SEQ ID NO: 1002 - RNA, 16 nt, Artificial
  Part of exon 27 of the human dystrophin transcript
accaguggcucugcac

SEQ ID NO: 1003 - RNA, 20 nt, Artificial
  Part of exon 57 of the human dystrophin transcript
accaguggaagcgucugcac

SEQ ID NO: 1004 - RNA, 22 nt, Artificial
  Part of exon 27 of the human dystrophin transcript
cugcacuaggcugaaugggaaa

SEQ ID NO: 1005 - RNA, 22 nt, Artificial
  Part of exon 59 of the human dystrophin transcript
cugcacuccgcugacuggcaga

SEQ ID NO: 1006 - RNA, 25 nt, Artificial
  Part of exon 27 of the human dystrophin transcript
aagcgaaagugaaacuccuuacuga

SEQ ID NO: 1007 - RNA, 25 nt, Artificial
  Part of exon 60 of the human dystrophin transcript
aagagaacgugagccacgucaauga

SEQ ID NO: 1008 - RNA, 73 nt, Artificial
  Part of exon 28 of the human dystrophin transcript
auugucauacuuggagaaagcaaacaaguggcuaaaugaaguagaauuuaaacuuaaaaccacugaaaacauu

SEQ ID NO: 1009 - RNA, 74 nt, Artificial
  Part of exon 29 of the human dystrophin transcript
auucgcauauuggcacagacccuaacagauggcggagucauggaugagcuaaucaaugaggaacuugagacauu

SEQ ID NO: 1010 - RNA, 48 nt, Artificial
  Part of exon 28 of the human dystrophin transcript
guuggcaugaguuauugucauacuuggagaaagcaaacaaguggcuaa

SEQ ID NO: 1011 - RNA, 48 nt, Artificial
  Part of exon 30 of the human dystrophin transcript
guuggcagcuuauauugcagacaagguggacgcagcucaaaugccuca

SEQ ID NO: 1012 - RNA, 14 nt, Artificial
  Part of exon 28 of the human dystrophin transcript
aaaugaaguagaau

SEQ ID NO: 1013 - RNA, 14 nt, Artificial
  Part of exon 31 of the human dystrophin transcript
aaaugaagaaacau

SEQ ID NO: 1014 - RNA, 57 nt, Artificial
  Part of exon 28 of the human dystrophin transcript
agaaagcaaacaaguggcuaaaugaaguagaauuuaaacuuaaaaccacugaaaaca

SEQ ID NO: 1015 - RNA, 55 nt, Artificial
  Part of exon 32 of the human dystrophin transcript
agaaaguaagaugauuuuagaugaagugaagaugcacuugccugcauuggaaaca

SEQ ID NO: 1016 - RNA, 36 nt, Artificial
  Part of exon 28 of the human dystrophin transcript
acaaguggcuaaaugaaguagaauuuaaacuuaaaa

SEQ ID NO: 1017 - RNA, 36 nt, Artificial
  Part of exon 33 of the human dystrophin transcript
auaaaagucugagugaagugaagucugaaguggaaa

SEQ ID NO: 1018 - RNA, 24 nt, Artificial
  Part of exon 28 of the human dystrophin transcript
agaaagcaaacaaguggcuaaaug

SEQ ID NO: 1019 - RNA, 23 nt, Artificial
  Part of exon 34 of the human dystrophin transcript
agaaagcaacaguuggagaaaug

SEQ ID NO: 1020 - RNA, 19 nt, Artificial
  Part of exon 28 of the human dystrophin transcript
agcaaacaaguggcuaaau

SEQ ID NO: 1021 - RNA, 19 nt, Artificial
  Part of exon 35 of the human dystrophin transcript
agcagaagagugguuaaau

SEQ ID NO: 1022 - RNA, 38 nt, Artificial
  Part of exon 28 of the human dystrophin transcript
gagaaagcaaacaaguggcuaaaugaaguagaauuuaa

SEQ ID NO: 1023 - RNA, 38 nt, Artificial
  Part of exon 36 of the human dystrophin transcript
gagaaaaagaaaccccagcaaaaagaagacgugcuuaa

SEQ ID NO: 1024 - RNA, 17 nt, Artificial
  Part of exon 28 of the human dystrophin transcript
agaauuuaaacuuaaaa

SEQ ID NO: 1025 - RNA, 17 nt, Artificial
  Part of exon 37 of the human dystrophin transcript
agaauuaagacuggaaa

SEQ ID NO: 1026 - RNA, 20 nt, Artificial
  Part of exon 28 of the human dystrophin transcript
cuaaaugaaguagaauuuaa

SEQ ID NO: 1027 - RNA, 20 nt, Artificial
  Part of exon 38 of the human dystrophin transcript
cugaaagaggaagacuucaa

SEQ ID NO: 1028 - RNA, 45 nt, Artificial
  Part of exon 28 of the human dystrophin transcript
aaacaaguggcuaaaugaaguagaauuuaaacuuaaaaccacuga

SEQ ID NO: 1029 - RNA, 47 nt, Artificial
  Part of exon 39 of the human dystrophin transcript
aaagaauuguugcaaagaggagacaacuuacaacaaagaaucacaga

SEQ ID NO: 1030 - RNA, 78 nt, Artificial
  Part of exon 28 of the human dystrophin transcript
ggcuaaaugaaguagaauuuaaacuuaaaaccacugaaaacauuccuggcggagcugaggaaaucucugaggugcuag

SEQ ID NO: 1031 - RNA, 85 nt, Artificial
  Part of exon 40 of the human dystrophin transcript
gucucaaagaagaaaaaaggcucuagaaauuucucaucagugguaucaguacaagaggcaggcugaugaucuccugaaaugcuug

SEQ ID NO: 1032 - RNA, 39 nt, Artificial
  Part of exon 28 of the human dystrophin transcript
cugaaaacauuccuggcggagcugaggaaaucucugagg

SEQ ID NO: 1033 - RNA, 40 nt, Artificial
  Part of exon 41 of the human dystrophin transcript
cugaaugcagugcguaggcaagcugagggcuugucugagg

SEQ ID NO: 1034 - RNA, 21 nt, Artificial
  Part of exon 28 of the human dystrophin transcript
cugaggaaaucucugaggugc

SEQ ID NO: 1035 - RNA, 21 nt, Artificial
  Part of exon 42 of the human dystrophin transcript
cuuuggaaauuucuuaugugc

SEQ ID NO: 1036 - RNA, 100 nt, Artificial
  Part of exon 28 of the human dystrophin transcript
guuugggcauguuggcaugaguuauugucauacuuggagaaagcaaacaaguggcuaaaugaaguagaauuuaaacuuaaaaccacugaaaacauuccug

SEQ ID NO: 1037 - RNA, 94 nt, Artificial
  Part of exon 44 of the human dystrophin transcript
guugagaaauggcggcguuuucauuaugauauaaagauauuuaaucaguggcuaacagaagcugaacaguuucucagaaagacacaaauuccug

SEQ ID NO: 1038 - RNA, 41 nt, Artificial
  Part of exon 28 of the human dystrophin transcript
augaguuauugucauacuuggagaaagcaaacaaguggcua

SEQ ID NO: 1039 - RNA, 42 nt, Artificial
  Part of exon 46 of the human dystrophin transcript
augaauuuguuuuaugguuggaggaagcagauaacauugcua

SEQ ID NO: 1040 - RNA, 40 nt, Artificial
  Part of exon 28 of the human dystrophin transcript
aagcaaacaaguggcuaaaugaaguagaauuuaaacuuaa

SEQ ID NO: 1041 - RNA, 39 nt, Artificial
  Part of exon 47 of the human dystrophin transcript
aagcccagaagagcaagauaaacuugaaaauaagcucaa

SEQ ID NO: 1042 - RNA, 74 nt, Artificial
  Part of exon 28 of the human dystrophin transcript
aaugaaguagaauuuaaacuuaaaaccacugaaaacauuccuggcggagcugaggaaaucucugaggugcuaga

SEQ ID NO: 1043 - RNA, 68 nt, Artificial
  Part of exon 48 of the human dystrophin transcript
aaacaaggagaaauugaagcucaaauaaaagaccuugggcagcuugaaaaaaagcuugaagaccuuga

SEQ ID NO: 1044 - RNA, 25 nt, Artificial
  Part of exon 28 of the human dystrophin transcript
aaaugaaguagaauuuaaacuuaaa

SEQ ID NO: 1045 - RNA, 25 nt, Artificial
  Part of exon 49 of the human dystrophin transcript
aacugaaauagcaguucaagcuaaa

SEQ ID NO: 1046 - RNA, 96 nt, Artificial
  Part of exon 28 of the human dystrophin transcript
cuuggagaaagcaaacaaguggcuaaaugaaguagaauuuaaacuuaaaaccacugaaaacauuccuggcggagcugaggaaaucucugaggugcu

SEQ ID NO: 1047 - RNA, 97 nt, Artificial
  Part of exon 51 of the human dystrophin transcript
cuuggacagaacuuaccgacuggcuuucucugcuugaucaaguuauaaaaucacagagggugauggugggugaccuugaggauaucaacgagaugau

SEQ ID NO: 1048 - RNA, 61 nt, Artificial
  Part of exon 28 of the human dystrophin transcript
aguagaauuuaaacuuaaaaccacugaaaacauuccuggcggagcugaggaaaucucugag

SEQ ID NO: 1049 - RNA, 59 nt, Artificial
  Part of exon 53 of the human dystrophin transcript
aguugaaugaaauguuaaaggauucaacacaauggcuggaagcuaaggaagaagcugag

SEQ ID NO: 1050 - RNA, 48 nt, Artificial
  Part of exon 28 of the human dystrophin transcript
aaacuuaaaaccacugaaaacauuccuggcggagcugaggaaaucucu

SEQ ID NO: 1051 - RNA, 49 nt, Artificial
  Part of exon 55 of the human dystrophin transcript
aaacucauagauuacugcaacaguucccccuggaccuggaaaaguuucu

SEQ ID NO: 1052 - RNA, 20 nt, Artificial
  Part of exon 28 of the human dystrophin transcript
gcuaaaugaaguagaauuua

SEQ ID NO: 1053 - RNA, 20 nt, Artificial
  Part of exon 57 of the human dystrophin transcript
gcugaaagaugaugaauuaa

SEQ ID NO: 1054 - RNA, 26 nt, Artificial
  Part of exon 28 of the human dystrophin transcript
guagaauuuaaacuuaaaaccacuga

SEQ ID NO: 1055 - RNA, 26 nt, Artificial
  Part of exon 59 of the human dystrophin transcript
gaaaaauugaaccugcacuccgcuga

SEQ ID NO: 1056 - RNA, 69 nt, Artificial
  Part of exon 29 of the human dystrophin transcript
cuugaaaauuugaugcgacauucagaggauaacccaaaucagauucgcauauuggcacagacccuaaca

SEQ ID NO: 1057 - RNA, 69 nt, Artificial
  Part of exon 30 of the human dystrophin transcript
cuugaacagagcauccagucugcccaggagacugaaaaauccuuacacuuaauccaggagucccucaca

SEQ ID NO: 1058 - RNA, 28 nt, Artificial
  Part of exon 29 of the human dystrophin transcript
agucauggaugagcuaaucaaugaggaa

SEQ ID NO: 1059 - RNA, 32 nt, Artificial
  Part of exon 31 of the human dystrophin transcript
agucaugagaucaguuuagaagaaaugaagaa

SEQ ID NO: 1060 - RNA, 46 nt, Artificial
  Part of exon 29 of the human dystrophin transcript
acauucagaggauaacccaaaucagauucgcauauuggcacagacc

SEQ ID NO: 1061 - RNA, 45 nt, Artificial
  Part of exon 32 of the human dystrophin transcript
aaaauuacaagaugucuccaugaaguuucgauuauuccagaaacc

SEQ ID NO: 1062 - RNA, 23 nt, Artificial
  Part of exon 29 of the human dystrophin transcript
aaaauuugaugcgacauucagag

SEQ ID NO: 1063 - RNA, 23 nt, Artificial
  Part of exon 33 of the human dystrophin transcript
agaacuugaugaaagaguaacag

SEQ ID NO: 1064 - RNA, 41 nt, Artificial
  Part of exon 29 of the human dystrophin transcript
cagauucgcauauuggcacagacccuaacagauggcggagu

SEQ ID NO: 1065 - RNA, 40 nt, Artificial
  Part of exon 34 of the human dystrophin transcript
cagauauggaauugacaaagagaucagcaguugaaggaau

SEQ ID NO: 1066 - RNA, 54 nt, Artificial
  Part of exon 29 of the human dystrophin transcript
aacagauggcggagucauggaugagcuaaucaaugaggaacuugagacauuuaa

SEQ ID NO: 1067 - RNA, 49 nt, Artificial
  Part of exon 35 of the human dystrophin transcript
aacagaaggugcaccugaagaguaucacagagguaggagaggccuugaa

SEQ ID NO: 1068 - RNA, 75 nt, Artificial
  Part of exon 29 of the human dystrophin transcript
cacuugaaaauuugaugcgacauucagaggauaacccaaaucagauucgcauauuggcacagacccuaacagaug

SEQ ID NO: 1069 - RNA, 73 nt, Artificial
  Part of exon 36 of the human dystrophin transcript
cacauggaaacuuuugaccagaauguggaccacaucacaaaguggaucauucaggcugacacacuuuuggaug

SEQ ID NO: 1070 - RNA, 45 nt, Artificial
  Part of exon 29 of the human dystrophin transcript
gcauauuggcacagacccuaacagauggcggagucauggaugagc

SEQ ID NO: 1071 - RNA, 46 nt, Artificial
  Part of exon 37 of the human dystrophin transcript
ggaaauuaguagagccccaaaucucagagcucaaccaucgauuugc

SEQ ID NO: 1072 - RNA, 22 nt, Artificial
  Part of exon 29 of the human dystrophin transcript
aggaacuugagacauuuaauuc

SEQ ID NO: 1073 - RNA, 22 nt, Artificial
  Part of exon 38 of the human dystrophin transcript
aggaauuggagcaguuuaacuc

SEQ ID NO: 1074 - RNA, 38 nt, Artificial
  Part of exon 29 of the human dystrophin transcript
gagucauggaugagcuaaucaaugaggaacuugagaca

SEQ ID NO: 1075 - RNA, 38 nt, Artificial
  Part of exon 39 of the human dystrophin transcript
gaaucacagaugagagaaagcgagaggaaauaaagaua

SEQ ID NO: 1076 - RNA, 29 nt, Artificial
  Part of exon 29 of the human dystrophin transcript
ucacuugaaaauuugaugcgacauucaga

SEQ ID NO: 1077 - RNA, 29 nt, Artificial
  Part of exon 40 of the human dystrophin transcript
ucuccugaaaugcuuggaugacauugaaa

SEQ ID NO: 1078 - RNA, 15 nt, Artificial
  Part of exon 29 of the human dystrophin transcript
acccaaaucagauuc

SEQ ID NO: 1079 - RNA, 15 nt, Artificial
  Part of exon 41 of the human dystrophin transcript
agccaacucagaucc

SEQ ID NO: 1080 - RNA, 18 nt, Artificial
  Part of exon 29 of the human dystrophin transcript
cacagacccuaacagaug

SEQ ID NO: 1081 - RNA, 18 nt, Artificial
  Part of exon 42 of the human dystrophin transcript
cacaagcccuauuagaag

SEQ ID NO: 1082 - RNA, 55 nt, Artificial
  Part of exon 29 of the human dystrophin transcript
auucagaggauaacccaaaucagauucgcauauuggcacagacccuaacagaugg

SEQ ID NO: 1083 - RNA, 60 nt, Artificial
  Part of exon 44 of the human dystrophin transcript
aaucaguggcuaacagaagcugaacaguuucucagaaagacacaaauuccugagaauugg

SEQ ID NO: 1084 - RNA, 35 nt, Artificial
  Part of exon 29 of the human dystrophin transcript
gaugagcuaaucaaugaggaacuugagacauuuaa

SEQ ID NO: 1085 - RNA, 35 nt, Artificial
  Part of exon 46 of the human dystrophin transcript
gagcagcaacuaaaagaaaagcuugagcaagucaa

SEQ ID NO: 1086 - RNA, 33 nt, Artificial
  Part of exon 29 of the human dystrophin transcript
acuugaaaauuugaugcgacauucagaggauaa

SEQ ID NO: 1087 - RNA, 41 nt, Artificial
  Part of exon 47 of the human dystrophin transcript
acuugaaaauaagcucaagcagacaaaucuccaguggauaa

SEQ ID NO: 1088 - RNA, 14 nt, Artificial
  Part of exon 29 of the human dystrophin transcript
ucacuugaaaauuu

SEQ ID NO: 1089 - RNA, 14 nt, Artificial
  Part of exon 48 of the human dystrophin transcript
ucaguuggaaauuu

SEQ ID NO: 1090 - RNA, 29 nt, Artificial
  Part of exon 29 of the human dystrophin transcript
agcuaaucaaugaggaacuugagacauuu

SEQ ID NO: 1091 - RNA, 29 nt, Artificial
  Part of exon 49 of the human dystrophin transcript
agcuaaacaaccggauguggaagagauuu

SEQ ID NO: 1092 - RNA, 36 nt, Artificial
  Part of exon 29 of the human dystrophin transcript
aacuugagacauuuaauucucguuggagggaacuac

SEQ ID NO: 1093 - RNA, 40 nt, Artificial
  Part of exon 51 of the human dystrophin transcript
aacuagaaaugccaucuuccuugauguuggagguaccugc

SEQ ID NO: 1094 - RNA, 40 nt, Artificial
  Part of exon 29 of the human dystrophin transcript
uugagacauuuaauucucguuggagggaacuacaugaaga

SEQ ID NO: 1095 - RNA, 40 nt, Artificial
  Part of exon 53 of the human dystrophin transcript
uugaaagaauucagaaucagugggaugaaguacaagaaca

SEQ ID NO: 1096 - RNA, 75 nt, Artificial
  Part of exon 29 of the human dystrophin transcript
cuugaaaauuugaugcgacauucagaggauaacccaaaucagauucgcauauuggcacagacccuaacagauggc

SEQ ID NO: 1097 - RNA, 79 nt, Artificial
  Part of exon 55 of the human dystrophin transcript
cuggaaaaguuucuugccuggcuuacagaagcugaaacaacugccaauguccuacaggaugcuacccguaaggaaaggc

SEQ ID NO: 1098 - RNA, 16 nt, Artificial
  Part of exon 29 of the human dystrophin transcript
auuugaugcgacauuc

SEQ ID NO: 1099 - RNA, 16 nt, Artificial
  Part of exon 57 of the human dystrophin transcript
auuggaggcgacuuuc

SEQ ID NO: 1100 - RNA, 89 nt, Artificial
  Part of exon 29 of the human dystrophin transcript
gaaaauuugaugcgacauucagaggauaacccaaaucagauucgcauauuggcacagacccuaacagauggcggagucauggaugagcu

SEQ ID NO: 1101 - RNA, 92 nt, Artificial
  Part of exon 59 of the human dystrophin transcript
gaaaaauugaaccugcacuccgcugacuggcagagaaaaauagaugagacccuugaaagacuccaggaacuucaagaggccacggaugagcu

SEQ ID NO: 1102 - RNA, 38 nt, Artificial
  Part of exon 30 of the human dystrophin transcript
uaaggaggcaaaaguugcuugaacagagcauccagucu

SEQ ID NO: 1103 - RNA, 37 nt, Artificial
  Part of exon 31 of the human dystrophin transcript
uaaucaggggaaggaggcugcccaaagaguccugucu

SEQ ID NO: 1104 - RNA, 35 nt, Artificial
  Part of exon 30 of the human dystrophin transcript
acaagcaguuggcagcuuauauugcagacaaggug

SEQ ID NO: 1105 - RNA, 31 nt, Artificial
  Part of exon 32 of the human dystrophin transcript
agaugcacuugccugcauuggaaacaaagag

SEQ ID NO: 1106 - RNA, 67 nt, Artificial
  Part of exon 30 of the human dystrophin transcript
aggagacugaaaaauccuuacacuuaauccaggagucccucacauucauugacaagcaguuggcagc

SEQ ID NO: 1107 - RNA, 73 nt, Artificial
  Part of exon 33 of the human dystrophin transcript
agcagacggaaaaucccaaagaacuugaugaaagaguaacagcuuugaaauugcauuauaaugagcugggagc

SEQ ID NO: 1108 - RNA, 56 nt, Homo sapiens
uugacaagcaguuggcagcuuauauugcagacaagguggacgcagcucaaaugccu

SEQ ID NO: 1109 - RNA, 66 nt, Homo sapiens
uugacagaauggcuggcagcuacagauauggaauugacaaagagaucagcaguugaaggaaugccu

SEQ ID NO: 1110 - RNA, 56 nt, Artificial
  Part of exon 30 of the human dystrophin transcript
guaaggaggcaaaaguugcuugaacagagcauccagucugcccaggagacugaaaa

SEQ ID NO: 1111 - RNA, 56 nt, Artificial
  Part of exon 34 of the human dystrophin transcript
gcaagaaggagacguugguggaagauaaacucagucuucugaauaguaacuggaua

SEQ ID NO: 1112 - RNA, 55 nt, Artificial
  Part of exon 30 of the human dystrophin transcript
acaagcaguuggcagcuuauauugcagacaagguggacgcagcucaaaugccuca

SEQ ID NO: 1113 - RNA, 54 nt, Artificial
  Part of exon 36 of the human dystrophin transcript
agaaacacauggaaacuuuugaccagaauguggaccacaucacaaaguggauca

SEQ ID NO: 1114 - RNA, 16 nt, Artificial
  Part of exon 30 of the human dystrophin transcript
caaaaguugcuugaac

SEQ ID NO: 1115 - RNA, 16 nt, Artificial
  Part of exon 37 of the human dystrophin transcript
caaaaauugcuugaac

SEQ ID NO: 1116 - RNA, 19 nt, Artificial
  Part of exon 30 of the human dystrophin transcript
cagcuuauauugcagacaa

SEQ ID NO: 1117 - RNA, 19 nt, Artificial
  Part of exon 38 or 39 of the human dystrophin transcript
cagcagcuguuacagacaa

SEQ ID NO: 1118 - RNA, 24 nt, Artificial
  Part of exon 30 of the human dystrophin transcript
cauugacaagcaguuggcagcuua

SEQ ID NO: 1119 - RNA, 25 nt, Artificial
  Part of exon 40 of the human dystrophin transcript
cauugaaaaaaaauuagccagccua

SEQ ID NO: 1120 - RNA, 33 nt, Artificial
  Part of exon 30 of the human dystrophin transcript
guggacgcagcucaaaugccucaggaagcccag

SEQ ID NO: 1121 - RNA, 35 nt, Artificial
  Part of exon 41 of the human dystrophin transcript
guggagccaacucagauccagcucagcaagcgcug

SEQ ID NO: 1122 - RNA, 53 nt, Artificial
  Part of exon 30 of the human dystrophin transcript
ccagucugcccaggagacugaaaaauccuuacacuuaauccaggagucccuca

SEQ ID NO: 1123 - RNA, 50 nt, Artificial
  Part of exon 42 of the human dystrophin transcript
ccucugugcuaaggacuuugaagaucucuuuaagcaagaggagucucuga

SEQ ID NO: 1124 - RNA, 16 nt, Artificial
  Part of exon 30 of the human dystrophin transcript
cucaaaugccucagga

SEQ ID NO: 1125 - RNA, 16 nt, Artificial
  Part of exon 44 of the human dystrophin transcript
cacaaauuccugagaa

SEQ ID NO: 1126 - RNA, 19 nt, Artificial
  Part of exon 30 of the human dystrophin transcript
cuugaacagagcauccagu

SEQ ID NO: 1127 - RNA, 19 nt, Artificial
  Part of exon 46 of the human dystrophin transcript
cuggaaaagagcagcaacu

SEQ ID NO: 1128 - RNA, 64 nt, Artificial
  Part of exon 30 of the human dystrophin transcript
ugcuugaacagagcauccagucugcccaggagacugaaaaauccuuacacuuaauccaggaguc

SEQ ID NO: 1129 - RNA, 64 nt, Artificial
  Part of exon 47 of the human dystrophin transcript
ugcuuguaagugcucccauaagcccagaagagcaagauaaacuugaaaauaagcucaagcagac

SEQ ID NO: 1130 - RNA, 25 nt, Artificial
  Part of exon 30 of the human dystrophin transcript
auugacaagcaguuggcagcuuaua

SEQ ID NO: 1131 - RNA, 25 nt, Artificial
  Part of exon 48 of the human dystrophin transcript
auuaggaaucaguuggaaauuuaua

SEQ ID NO: 1132 - RNA, 43 nt, Artificial
  Part of exon 30 of the human dystrophin transcript
uguaaggaggcaaaaguugcuugaacagagcauccagucugcc

SEQ ID NO: 1133 - RNA, 44 nt, Artificial
  Part of exon 49 of the human dystrophin transcript
ucuaaagggcagcauuuguacaaggaaaaaccagccacucagcc

SEQ ID NO: 1134 - RNA, 25 nt, Artificial
  Part of exon 30 of the human dystrophin transcript
gcuugaacagagcauccagucugcc

SEQ ID NO: 1135 - RNA, 25 nt, Artificial
  Part of exon 51 of the human dystrophin transcript
gcuuggacagaacuuaccgacuggc

SEQ ID NO: 1136 - RNA, 20 nt, Artificial
  Part of exon 30 of the human dystrophin transcript
ggaggcaaaaguugcuugaa

SEQ ID NO: 1137 - RNA, 20 nt, Artificial
  Part of exon 53 of the human dystrophin transcript
ggaggcaacaguugaaugaa

SEQ ID NO: 1138 - RNA, 14 nt, Artificial
  Part of exon 30 of the human dystrophin transcript
gcaaaaguugcuug

SEQ ID NO: 1139 - RNA, 14 nt, Artificial
  Part of exon 55 of the human dystrophin transcript
ggaaaaguuucuug

SEQ ID NO: 1140 - RNA, 13 nt, Artificial
  Part of exon 30 of the human dystrophin transcript
aaaaauccuuaca

SEQ ID NO: 1141 - RNA, 13 nt, Artificial
  Part of exon 57 of the human dystrophin transcript
aaaaauccugaga

SEQ ID NO: 1142 - RNA, 23 nt, Artificial
  Part of exon 30 of the human dystrophin transcript
ugaacagagcauccagucugccc

SEQ ID NO: 1143 - RNA, 23 nt, Artificial
  Part of exon 59 of the human dystrophin transcript
ugaucaagggauccuggcagccc

SEQ ID NO: 1144 - RNA, 22 nt, Artificial
  Part of exon 30 of the human dystrophin transcript
ugacaagcaguuggcagcuuau

SEQ ID NO: 1145 - RNA, 22 nt, Artificial
  Part of exon 60 of the human dystrophin transcript
ugaacaccagauggaagcuucu

SEQ ID NO: 1146 - RNA, 38 nt, Artificial
  Part of exon 31 of the human dystrophin transcript
acaagucaugagaucaguuuagaagaaaugaagaaaca

SEQ ID NO: 1147 - RNA, 39 nt, Artificial
  Part of exon 32 of the human dystrophin transcript
acaagaaaguaagaugauuuuagaugaagugaagaugca

SEQ ID NO: 1148 - RNA, 66 nt, Artificial
  Part of exon 31 of the human dystrophin transcript
aagucaugagaucaguuuagaagaaaugaagaaacauaaucaggggaaggaggcugcccaaagagu

SEQ ID NO: 1149 - RNA, 65 nt, Artificial
  Part of exon 33 of the human dystrophin transcript
aagacuggacgucagauuguacagaaaaagcagacggaaaaucccaaagaacuugaugaaagagu

SEQ ID NO: 1150 - RNA, 36 nt, Artificial
  Part of exon 31 of the human dystrophin transcript
gauuugacaagucaugagaucaguuuagaagaaaug

SEQ ID NO: 1151 - RNA, 33 nt, Artificial
  Part of exon 34 of the human dystrophin transcript
gaauugacaaagagaucagcaguugaaggaaug

SEQ ID NO: 1152 - RNA, 21 nt, Artificial
  Part of exon 31 of the human dystrophin transcript
agaagaaaugaagaaacauaa

SEQ ID NO: 1153 - RNA, 21 nt, Artificial
  Part of exon 35 of the human dystrophin transcript
aaaagagauugagaaacagaa

SEQ ID NO: 1154 - RNA, 26 nt, Artificial
  Part of exon 31 of the human dystrophin transcript
uuuagaagaaaugaagaaacauaauc

SEQ ID NO: 1155 - RNA, 26 nt, Artificial
  Part of exon 36 of the human dystrophin transcript
uuuggaugaaucagagaaaaagaaac

SEQ ID NO: 1156 - RNA, 34 nt, Artificial
  Part of exon 31 of the human dystrophin transcript
caaucugauuugacaagucaugagaucaguuuag

SEQ ID NO: 1157 - RNA, 35 nt, Artificial
  Part of exon 37 of the human dystrophin transcript
caaaccgcggugaccacugcaggaaauuaguagag

SEQ ID NO: 1158 - RNA, 53 nt, Artificial
  Part of exon 31 of the human dystrophin transcript
uccaaucugauuugacaagucaugagaucaguuuagaagaaaugaagaaacau

SEQ ID NO: 1159 - RNA, 49 nt, Artificial
  Part of exon 38 of the human dystrophin transcript
uccauuccuuugaaggaauuggagcaguuuaacucagauauacaaaaau

SEQ ID NO: 1160 - RNA, 38 nt, Artificial
  Part of exon 31 of the human dystrophin transcript
augagaucaguuuagaagaaaugaagaaacauaaucag

SEQ ID NO: 1161 - RNA, 38 nt, Artificial
  Part of exon 39 of the human dystrophin transcript
augagagaaagcgagaggaaauaaagauaaaacagcag

SEQ ID NO: 1162 - RNA, 38 nt, Artificial
  Part of exon 31 of the human dystrophin transcript
ucaugagaucaguuuagaagaaaugaagaaacauaauc

SEQ ID NO: 1163 - RNA, 37 nt, Artificial
  Part of exon 40 of the human dystrophin transcript
uccugaaaugcuuggaugacauugaaaaaaaauuagc

SEQ ID NO: 1164 - RNA, 31 nt, Artificial
  Part of exon 31 of the human dystrophin transcript
auuugacaagucaugagaucaguuuagaaga

SEQ ID NO: 1165 - RNA, 31 nt, Artificial
  Part of exon 41 of the human dystrophin transcript
aauugagagcaaauuugcucaguuucgaaga

SEQ ID NO: 1166 - RNA, 13 nt, Artificial
  Part of exon 31 of the human dystrophin transcript
gaagaaaugaaga

SEQ ID NO: 1167 - RNA, 13 nt, Artificial
  Part of exon 42 of the human dystrophin transcript
gaagaaacgauga

SEQ ID NO: 1168 - RNA, 40 nt, Artificial
  Part of exon 31 of the human dystrophin transcript
aagaaaugaagaaacauaaucaggggaaggaggcugccca

SEQ ID NO: 1169 - RNA, 43 nt, Artificial
  Part of exon 44 of the human dystrophin transcript
augauauaaagauauuuaaucaguggcuaacagaagcugaaca

SEQ ID NO: 1170 - RNA, 16 nt, Artificial
  Part of exon 31 of the human dystrophin transcript
uagaagaaaugaagaa

SEQ ID NO: 1171 - RNA, 16 nt, Artificial
  Part of exon 46 of the human dystrophin transcript
uagaagaacaaaagaa

SEQ ID NO: 1172 - RNA, 54 nt, Artificial
  Part of exon 31 of the human dystrophin transcript
aagucaugagaucaguuuagaagaaaugaagaaacauaaucaggggaaggaggc

SEQ ID NO: 1173 - RNA, 57 nt, Artificial
  Part of exon 47 of the human dystrophin transcript
aagugcucccauaagcccagaagagcaagauaaacuugaaaauaagcucaagcagac

SEQ ID NO: 1174 - RNA, 51 nt, Artificial
  Part of exon 31 of the human dystrophin transcript
aaauccaaucugauuugacaagucaugagaucaguuuagaagaaaugaaga

SEQ ID NO: 1175 - RNA, 52 nt, Artificial
  Part of exon 48 of the human dystrophin transcript
aaauugaagcucaaauaaaagaccuugggcagcuugaaaaaaagcuugaaga

SEQ ID NO: 1176 - RNA, 23 nt, Artificial
  Part of exon 31 of the human dystrophin transcript
ggggaaggaggcugcccaaagag

SEQ ID NO: 1177 - RNA, 24 nt, Artificial
  Part of exon 49 of the human dystrophin transcript
guggaagagauuuugucuaaaggg

SEQ ID NO: 1178 - RNA, 25 nt, Artificial
  Part of exon 31 of the human dystrophin transcript
ucugauuugacaagucaugagauca

SEQ ID NO: 1179 - RNA, 25 nt, Artificial
  Part of exon 51 of the human dystrophin transcript
ucugcuugaucaaguuauaaaauca

SEQ ID NO: 1180 - RNA, 22 nt, Artificial
  Part of exon 31 of the human dystrophin transcript
ggaaggaggcugcccaaagagu

SEQ ID NO: 1181 - RNA, 22 nt, Artificial
  Part of exon 53 of the human dystrophin transcript
ggaaggagggucccuauacagu

SEQ ID NO: 1182 - RNA, 19 nt, Artificial
  Part of exon 31 of the human dystrophin transcript
uagaagaaaugaagaaaca

SEQ ID NO: 1183 - RNA, 19 nt, Artificial
  Part of exon 55 of the human dystrophin transcript
uaaaagagcugaugaaaca

SEQ ID NO: 1184 - RNA, 32 nt, Artificial
  Part of exon 31 of the human dystrophin transcript
auuugacaagucaugagaucaguuuagaagaa

SEQ ID NO: 1185 - RNA, 32 nt, Artificial
  Part of exon 57 of the human dystrophin transcript
auuggaggcgacuuuccagcaguucagaagca

SEQ ID NO: 1186 - RNA, 23 nt, Artificial
  Part of exon 31 of the human dystrophin transcript
uaaucaggggaaggaggcugccc

SEQ ID NO: 1187 - RNA, 23 nt, Artificial
  Part of exon 59 of the human dystrophin transcript
ugaucaagggauccuggcagccc

SEQ ID NO: 1188 - RNA, 22 nt, Artificial
  Part of exon 31 of the human dystrophin transcript
aucaguuuagaagaaaugaaga

SEQ ID NO: 1189 - RNA, 22 nt, Artificial
  Part of exon 60 of the human dystrophin transcript
agcacucuggaagaccugaaca

SEQ ID NO: 1190 - RNA, 68 nt, Artificial
  Part of exon 32 of the human dystrophin transcript
ugaagugaagaugcacuugccugcauuggaaacaaagaguguggaacaggaaguaguacagucacagc

SEQ ID NO: 1191 - RNA, 62 nt, Artificial
  Part of exon 33 of the human dystrophin transcript
ugaagugaagucugaaguggaaauggugauaaagacuggacgucagauuguacagaaaaagc

SEQ ID NO: 1192 - RNA, 62 nt, Artificial
  Part of exon 32 of the human dystrophin transcript
guaagaugauuuuagaugaagugaagaugcacuugccugcauuggaaacaaagaguguggaa

SEQ ID NO: 1193 - RNA, 59 nt, Artificial
  Part of exon 34 of the human dystrophin transcript
guaagaugcgaaaggaaaugaaugucuugacagaauggcuggcagcuacagauauggaa

SEQ ID NO: 1194 - RNA, 25 nt, Artificial
  Part of exon 32 of the human dystrophin transcript
aaacaaagaguguggaacaggaagu

SEQ ID NO: 1195 - RNA, 25 nt, Artificial
  Part of exon 35 of the human dystrophin transcript
aaaaagagauugagaaacagaaggu

SEQ ID NO: 1196 - RNA, 95 nt, Artificial
  Part of exon 32 of the human dystrophin transcript
auuccagaaaccagccaauuuugagcagcgucuacaagaaaguaagaugauuuuagaugaagugaagaugcacuugccugcauuggaaacaaaga

SEQ ID NO: 1197 - RNA, 98 nt, Artificial
  Part of exon 36 of the human dystrophin transcript
auaccagaaacacauggaaacuuuugaccagaauguggaccacaucacaaaguggaucauucaggcugacacacuuuuggaugaaucagagaaaaaga

SEQ ID NO: 1198 - RNA, 17 nt, Artificial
  Part of exon 32 of the human dystrophin transcript
ucacagcuaaaucauug

SEQ ID NO: 1199 - RNA, 17 nt, Artificial
  Part of exon 37 of the human dystrophin transcript
ucagagcucaaccaucg

SEQ ID NO: 1200 - RNA, 17 nt, Artificial
  Part of exon 32 of the human dystrophin transcript
gaguguggaacaggaag

SEQ ID NO: 1201 - RNA, 17 nt, Artificial
  Part of exon 38 of the human dystrophin transcript
gaaucugaaagaggaag

SEQ ID NO: 1202 - RNA, 46 nt, Artificial
  Part of exon 32 of the human dystrophin transcript
ggaaacaaagaguguggaacaggaaguaguacagucacagcuaaau

SEQ ID NO: 1203 - RNA, 43 nt, Artificial
  Part of exon 39 of the human dystrophin transcript
ggaaauaaagauaaaacagcagcuguuacagacaaaacauaau

SEQ ID NO: 1204 - RNA, 61 nt, Artificial
  Part of exon 32 of the human dystrophin transcript
uacaagaaaguaagaugauuuuagaugaagugaagaugcacuugccugcauuggaaacaaa

SEQ ID NO: 1205 - RNA, 54 nt, Artificial
  Part of exon 40 of the human dystrophin transcript
uacaagaggcaggcugaugaucuccugaaaugcuuggaugacauugaaaaaaaa

SEQ ID NO: 1206 - RNA, 60 nt, Artificial
  Part of exon 32 of the human dystrophin transcript
gcauuggaaacaaagaguguggaacaggaaguaguacagucacagcuaaaucauugugug

SEQ ID NO: 1207 - RNA, 61 nt, Artificial
  Part of exon 41 of the human dystrophin transcript
gaauugcagaagaagaaagaggagcugaaugcagugcguaggcaagcugagggcuugucug

SEQ ID NO: 1208 - RNA, 50 nt, Artificial
  Part of exon 32 of the human dystrophin transcript
aaguaagaugauuuuagaugaagugaagaugcacuugccugcauuggaaa

SEQ ID NO: 1209 - RNA, 42 nt, Artificial
  Part of exon 42 of the human dystrophin transcript
aagaaacgaugauggugaugacugaagacaugccuuuggaaa

SEQ ID NO: 1210 - RNA, 100 nt, Artificial
  Part of exon 32 of the human dystrophin transcript
guuucgauuauuccagaaaccagccaauuuugagcagcgucuacaagaaaguaagaugauuuuagaugaagugaagaugcacuugccugcauuggaaaca

SEQ ID NO: 1211 - RNA, 91 nt, Artificial
  Part of exon 44 of the human dystrophin transcript
guuuucauuaugauauaaagauauuuaaucaguggcuaacagaagcugaacaguuucucagaaagacacaaauuccugagaauugggaaca

SEQ ID NO: 1212 - RNA, 55 nt, Artificial
  Part of exon 32 of the human dystrophin transcript
augaaguuucgauuauuccagaaaccagccaauuuugagcagcgucuacaagaaa

SEQ ID NO: 1213 - RNA, 54 nt, Artificial
  Part of exon 46 of the human dystrophin transcript
auaacauugcuaguaucccacuugaaccuggaaaagagcagcaacuaaaagaaa

SEQ ID NO: 1214 - RNA, 28 nt, Artificial
  Part of exon 32 of the human dystrophin transcript
gagcagcgucuacaagaaaguaagauga

SEQ ID NO: 1215 - RNA, 28 nt, Artificial
  Part of exon 47 of the human dystrophin transcript
gagcaagauaaacuugaaaauaagcuca

SEQ ID NO: 1216 - RNA, 97 nt, Artificial
  Part of exon 32 of the human dystrophin transcript
agaaaguaagaugauuuuagaugaagugaagaugcacuugccugcauuggaaacaaagaguguggaacaggaaguaguacagucacagcuaaaucau

SEQ ID NO: 1217 - RNA, 86 nt, Artificial
  Part of exon 48 of the human dystrophin transcript
agaaacaaggagaaauugaagcucaaauaaaagaccuugggcagcuugaaaaaaagcuugaagaccuugaagagcaguuaaaucau

SEQ ID NO: 1218 - RNA, 14 nt, Artificial
  Part of exon 32 of the human dystrophin transcript
agaaaccagccaau

SEQ ID NO: 1219 - RNA, 14 nt, Artificial
  Part of exon 49 of the human dystrophin transcript
aaaaaccagccacu

SEQ ID NO: 1220 - RNA, 49 nt, Artificial
  Part of exon 32 of the human dystrophin transcript
uugagcagcgucuacaagaaaguaagaugauuuuagaugaagugaagau

SEQ ID NO: 1221 - RNA, 50 nt, Artificial
  Part of exon 51 of the human dystrophin transcript
uugaucaaguuauaaaaucacagagggugauggugggugaccuugaggau

SEQ ID NO: 1222 - RNA, 45 nt, Artificial
  Part of exon 32 of the human dystrophin transcript
uggaaacaaagaguguggaacaggaaguaguacagucacagcuaa

SEQ ID NO: 1223 - RNA, 49 nt, Artificial
  Part of exon 53 of the human dystrophin transcript
uggaagcuaaggaagaagcugagcaggucuuaggacaggccagagccaa

SEQ ID NO: 1224 - RNA, 56 nt, Artificial
  Part of exon 32 of the human dystrophin transcript
cagaaaccagccaauuuugagcagcgucuacaagaaaguaagaugauuuuagauga

SEQ ID NO: 1225 - RNA, 58 nt, Artificial
  Part of exon 55 of the human dystrophin transcript
cugaaacaacugccaauguccuacaggaugcuacccguaaggaaaggcuccuagaaga

SEQ ID NO: 1226 - RNA, 18 nt, Artificial
  Part of exon 32 of the human dystrophin transcript
agccaauuuugagcagcg

SEQ ID NO: 1227 - RNA, 18 nt, Artificial
  Part of exon 57 of the human dystrophin transcript
agccaguucugaccagug

SEQ ID NO: 1228 - RNA, 40 nt, Artificial
  Part of exon 32 of the human dystrophin transcript
gaugaagugaagaugcacuugccugcauuggaaacaaaga

SEQ ID NO: 1229 - RNA, 40 nt, Artificial
  Part of exon 59 of the human dystrophin transcript
gaaaaauugaaccugcacuccgcugacuggcagagaaaaa

SEQ ID NO: 1230 - RNA, 39 nt, Artificial
  Part of exon 32 of the human dystrophin transcript
agaugcacuugccugcauuggaaacaaagaguguggaac

SEQ ID NO: 1231 - RNA, 37 nt, Artificial
  Part of exon 60 of the human dystrophin transcript
aggagaaauugcgccucugaaagagaacgugagccac

SEQ ID NO: 1232 - RNA, 39 nt, Artificial
  Part of exon 33 of the human dystrophin transcript
acuuguauaaaagucugagugaagugaagucugaagugg

SEQ ID NO: 1233 - RNA, 38 nt, Artificial
  Part of exon 34 of the human dystrophin transcript
aguugaaggaaugccuaguaauuuggauucugaaguug

SEQ ID NO: 1234 - RNA, 61 nt, Artificial
  Part of exon 33 of the human dystrophin transcript
aaucccaaagaacuugaugaaagaguaacagcuuugaaauugcauuauaaugagcugggag

SEQ ID NO: 1235 - RNA, 58 nt, Artificial
  Part of exon 35 of the human dystrophin transcript
acucaaaaagagauugagaaacagaaggugcaccugaagaguaucacagagguaggag

SEQ ID NO: 1236 - RNA, 35 nt, Artificial
  Part of exon 33 of the human dystrophin transcript
agcagacggaaaaucccaaagaacuugaugaaaga

SEQ ID NO: 1237 - RNA, 40 nt, Artificial
  Part of exon 38 of the human dystrophin transcript
agcagggggugaaucugaaagaggaagacuucaauaaaga

SEQ ID NO: 1238 - RNA, 85 nt, Artificial
  Part of exon 33 of the human dystrophin transcript
aacuuguauaaaagucugagugaagugaagucugaaguggaaauggugauaaagacuggacgucagauuguacagaaaaagcaga

SEQ ID NO: 1239 - RNA, 79 nt, Artificial
  Part of exon 39 of the human dystrophin transcript
aacuuacaacaaagaaucacagaugagagaaagcgagaggaaauaaagauaaaacagcagcuguuacagacaaaacaua

SEQ ID NO: 1240 - RNA, 99 nt, Artificial
  Part of exon 33 of the human dystrophin transcript
gaagugaagucugaaguggaaauggugauaaagacuggacgucagauuguacagaaaaagcagacggaaaaucccaaagaacuugaugaaagaguaaca

SEQ ID NO: 1241 - RNA, 108 nt, Artificial
  Part of exon 40 of the human dystrophin transcript
gauuugaggucucaaagaagaaaaaaggcucuagaaauuucucaucagugguaucaguacaagaggcaggcugaugaucuccugaaaugcuuggaugacauugaaaaa

SEQ ID NO: 1242 - RNA, 31 nt, Artificial
  Part of exon 33 of the human dystrophin transcript
ucagauuguacagaaaaagcagacggaaaau

SEQ ID NO: 1243 - RNA, 33 nt, Artificial
  Part of exon 41 of the human dystrophin transcript
ucagauccagcucagcaagcgcuggcgggaaau

SEQ ID NO: 1244 - RNA, 28 nt, Artificial
  Part of exon 33 of the human dystrophin transcript
ugaaguggaaauggugauaaagacugga

SEQ ID NO: 1245 - RNA, 28 nt, Artificial
  Part of exon 42 of the human dystrophin transcript
ugaagaaacgaugauggugaugacugaa

SEQ ID NO: 1246 - RNA, 25 nt, Artificial
  Part of exon 33 of the human dystrophin transcript
aaagaacuugaugaaagaguaacag

SEQ ID NO: 1247 - RNA, 26 nt, Artificial
  Part of exon 44 of the human dystrophin transcript
aaagauauuuaaucaguggcuaacag

SEQ ID NO: 1248 - RNA, 30 nt, Artificial
  Part of exon 33 of the human dystrophin transcript
aacuuguauaaaagucugagugaagugaag

SEQ ID NO: 1249 - RNA, 29 nt, Artificial
  Part of exon 46 of the human dystrophin transcript
aacuaaaagaaaagcuugagcaagucaag

SEQ ID NO: 1250 - RNA, 47 nt, Artificial
  Part of exon 33 of the human dystrophin transcript
ggaaaaucccaaagaacuugaugaaagaguaacagcuuugaaauugc

SEQ ID NO: 1251 - RNA, 51 nt, Artificial
  Part of exon 47 of the human dystrophin transcript
gggaauucucaaacaauuaaaugaaacuggaggacccgugcuuguaagugc

SEQ ID NO: 1252 - RNA, 22 nt, Artificial
  Part of exon 33 of the human dystrophin transcript
aaaaucccaaagaacuugauga

SEQ ID NO: 1253 - RNA, 22 nt, Artificial
  Part of exon 48 of the human dystrophin transcript
aaaagcuugaagaccuugaaga

SEQ ID NO: 1254 - RNA, 55 nt, Artificial
  Part of exon 33 of the human dystrophin transcript
cugaaguggaaauggugauaaagacuggacgucagauuguacagaaaaagcagac

SEQ ID NO: 1255 - RNA, 56 nt, Artificial
  Part of exon 49 of the human dystrophin transcript
cggauguggaagagauuuugucuaaagggcagcauuuguacaaggaaaaaccagcc

SEQ ID NO: 1256 - RNA, 53 nt, Artificial
  Part of exon 33 of the human dystrophin transcript
cagacggaaaaucccaaagaacuugaugaaagaguaacagcuuugaaauugca

SEQ ID NO: 1257 - RNA, 56 nt, Artificial
  Part of exon 51 of the human dystrophin transcript
caaacuagaaaugccaucuuccuugauguuggagguaccugcucuggcagauuuca

SEQ ID NO: 1258 - RNA, 58 nt, Artificial
  Part of exon 33 of the human dystrophin transcript
agaacuugaugaaagaguaacagcuuugaaauugcauuauaaugagcugggagcaaag

SEQ ID NO: 1259 - RNA, 62 nt, Artificial
  Part of exon 53 of the human dystrophin transcript
agaaccggaggcaacaguugaaugaaauguuaaaggauucaacacaauggcuggaagcuaag

SEQ ID NO: 1260 - RNA, 24 nt, Artificial
  Part of exon 33 of the human dystrophin transcript
aaagaacuugaugaaagaguaaca

SEQ ID NO: 1261 - RNA, 23 nt, Artificial
  Part of exon 55 of the human dystrophin transcript
aaagagcugaugaaacaauggca

SEQ ID NO: 1262 - RNA, 21 nt, Artificial
  Part of exon 33 of the human dystrophin transcript
gaagugaagucugaaguggaa

SEQ ID NO: 1263 - RNA, 23 nt, Artificial
  Part of exon 57 of the human dystrophin transcript
gaagccaguucugaccaguggaa

SEQ ID NO: 1264 - RNA, 98 nt, Artificial
  Part of exon 33 of the human dystrophin transcript
agucugagugaagugaagucugaaguggaaauggugauaaagacuggacgucagauuguacagaaaaagcagacggaaaaucccaaagaacuugauga

SEQ ID NO: 1265 - RNA, 103 nt, Artificial
  Part of exon 59 of the human dystrophin transcript
aggcugaggaggucaauacugagugggaaaaauugaaccugcacuccgcugacuggcagagaaaaauagaugagacccuugaaagacuccaggaacuucaaga

SEQ ID NO: 1266 - RNA, 36 nt, Artificial
  Part of exon 33 of the human dystrophin transcript
caaagaacuugaugaaagaguaacagcuuugaaauu

SEQ ID NO: 1267 - RNA, 37 nt, Artificial
  Part of exon 60 of the human dystrophin transcript
caaugaccuugcucgccagcuuaccacuuugggcauu

SEQ ID NO: 1268 - RNA, 40 nt, Artificial
  Part of exon 34 of the human dystrophin transcript
gcuacagauauggaauugacaaagagaucagcaguugaag

SEQ ID NO: 1269 - RNA, 42 nt, Artificial
  Part of exon 35 of the human dystrophin transcript
gcuacucaaaaagagauugagaaacagaaggugcaccugaag

SEQ ID NO: 1270 - RNA, 28 nt, Artificial
  Part of exon 34 of the human dystrophin transcript
gaaaggaaaugaaugucuugacagaaug

SEQ ID NO: 1271 - RNA, 29 nt, Artificial
  Part of exon 36 of the human dystrophin transcript
gaaacacauggaaacuuuugaccagaaug

SEQ ID NO: 1272 - RNA, 36 nt, Artificial
  Part of exon 34 of the human dystrophin transcript
gaaaugaaugucuugacagaauggcuggcagcuaca

SEQ ID NO: 1273 - RNA, 36 nt, Artificial
  Part of exon 37 of the human dystrophin transcript
gaacugaaugacauacgcccaaagguggacucuaca

SEQ ID NO: 1274 - RNA, 77 nt, Artificial
  Part of exon 34 of the human dystrophin transcript
agaaaugcuugaaauugucccguaagaugcgaaaggaaaugaaugucuugacagaauggcuggcagcuacagauaug

SEQ ID NO: 1275 - RNA, 76 nt, Artificial
  Part of exon 38 of the human dystrophin transcript
aaaauugcuugaaccacuggaggcugaaauucagcagggggugaaucugaaagaggaagacuucaauaaagauaug

SEQ ID NO: 1276 - RNA, 79 nt, Artificial
  Part of exon 34 of the human dystrophin transcript
aaggaaaugaaugucuugacagaauggcuggcagcuacagauauggaauugacaaagagaucagcaguugaaggaaugc

SEQ ID NO: 1277 - RNA, 78 nt, Artificial
  Part of exon 39 of the human dystrophin transcript
aagacaaugaggguacuguaaaagaauuguugcaaagaggagacaacuuacaacaaagaaucacagaugagagaaagc

SEQ ID NO: 1278 - RNA, 44 nt, Artificial
  Part of exon 34 of the human dystrophin transcript
gauauggaauugacaaagagaucagcaguugaaggaaugccuag

SEQ ID NO: 1279 - RNA, 47 nt, Artificial
  Part of exon 41 of the human dystrophin transcript
gaucgggaauugcagaagaagaaagaggagcugaaugcagugcguag

SEQ ID NO: 1280 - RNA, 34 nt, Artificial
  Part of exon 34 of the human dystrophin transcript
aaauugucccguaagaugcgaaaggaaaugaaug

SEQ ID NO: 1281 - RNA, 36 nt, Artificial
  Part of exon 42 of the human dystrophin transcri
acacuguccgugaagaaacgaugauggugaugacug

SEQ ID NO: 1282 - RNA, 51 nt, Artificial
  Part of exon 34 of the human dystrophin transcript
agaaaugcuugaaauugucccguaagaugcgaaaggaaaugaaugucuuga

SEQ ID NO: 1283 - RNA, 48 nt, Artificial
  Part of exon 44 of the human dystrophin transcript
acaaauuccugagaauugggaacaugcuaaauacaaaugguaucuuaa

SEQ ID NO: 1284 - RNA, 21 nt, Artificial
  Part of exon 34 of the human dystrophin transcript
aaaugaaugucuugacagaau

SEQ ID NO: 1285 - RNA, 21 nt, Artificial
  Part of exon 46 of the human dystrophin transcript
aaaagaauaucuugucagaau

SEQ ID NO: 1286 - RNA, 103 nt, Artificial
  Part of exon 34 of the human dystrophin transcript
aaagcaacaguuggagaaaugcuugaaauugucccguaagaugcgaaaggaaaugaaugucuugacagaauggcuggcagcuacagauauggaauugacaaag

SEQ ID NO: 1287 - RNA, 102 nt, Artificial
  Part of exon 47 of the human dystrophin transcript
aaugaaacuggaggacccgugcuuguaagugcucccauaagcccagaagagcaagauaaacuugaaaauaagcucaagcagacaaaucuccaguggauaaag

SEQ ID NO: 1288 - RNA, 17 nt, Artificial
  Part of exon 34 of the human dystrophin transcript
uuggagaaaugcuugaa

SEQ ID NO: 1289 - RNA, 17 nt, Artificial
  Part of exon 48 of the human dystrophin transcript
uugaaaaaaagcuugaa

SEQ ID NO: 1290 - RNA, 63 nt, Artificial
  Part of exon 34 of the human dystrophin transcript
cagauauggaauugacaaagagaucagcaguugaaggaaugccuaguaauuuggauucugaag

SEQ ID NO: 1291 - RNA, 71 nt, Artificial
  Part of exon 49 of the human dystrophin transcript
cggauguggaagagauuuugucuaaagggcagcauuuguacaaggaaaaaccagccacucagccagugaag

SEQ ID NO: 1292 - RNA, 36 nt, Artificial
  Part of exon 34 of the human dystrophin transcript
aggaaugccuaguaauuuggauucugaaguugccug

SEQ ID NO: 1293 - RNA, 35 nt, Artificial
  Part of exon 51 of the human dystrophin transcript
agaaaugccaucuuccuugauguuggagguaccug

SEQ ID NO: 1294 - RNA, 92 nt, Artificial
  Part of exon 34 of the human dystrophin transcript
gaaagaaagcaacaguuggagaaaugcuugaaauugucccguaagaugcgaaaggaaaugaaugucuugacagaauggcuggcagcuacaga

SEQ ID NO: 1295 - RNA, 107 nt, Artificial
  Part of exon 53 of the human dystrophin transcript
gaaagaauucagaaucagugggaugaaguacaagaacaccuucagaaccggaggcaacaguugaaugaaauguuaaaggauucaacacaauggcuggaagcuaagga

SEQ ID NO: 1296 - RNA, 56 nt, Artificial
  Part of exon 34 of the human dystrophin transcript
acaguuggagaaaugcuugaaauugucccguaagaugcgaaaggaaaugaaugucu

SEQ ID NO: 1297 - RNA, 56 nt, Artificial
  Part of exon 55 of the human dystrophin transcript
acagaagcugaaacaacugccaauguccuacaggaugcuacccguaaggaaaggcu

SEQ ID NO: 1298 - RNA, 50 nt, Artificial
  Part of exon 34 of the human dystrophin transcript
ggcuggcagcuacagauauggaauugacaaagagaucagcaguugaagga

SEQ ID NO: 1299 - RNA, 49 nt, Artificial
  Part of exon 57 of the human dystrophin transcript
ggcaggcaccuauuggaggcgacuuuccagcaguucagaagcagaacga

SEQ ID NO: 1300 - RNA, 46 nt, Artificial
  Part of exon 34 of the human dystrophin transcript
uggaauugacaaagagaucagcaguugaaggaaugccuaguaauuu

SEQ ID NO: 1301 - RNA, 45 nt, Artificial
  Part of exon 59 of the human dystrophin transcript
uggcagagaaaaauagaugagacccuugaaagacuccaggaacuu

SEQ ID NO: 1302 - RNA, 18 nt, Artificial
  Part of exon 34 of the human dystrophin transcript
aguaauuuggauucugaa

SEQ ID NO: 1303 - RNA, 18 nt, Artificial
  Part of exon 60 of the human dystrophin transcript
agaaauugcgccucugaa

SEQ ID NO: 1304 - RNA, 15 nt, Artificial
  Part of exon 35 of the human dystrophin transcript
gcaagaaggagacgu

SEQ ID NO: 1305 - RNA, 15 nt, Artificial
  Part of exon 36 of the human dystrophin transcript
gcaaaaagaagacgu

SEQ ID NO: 1306 - RNA, 28 nt, Artificial
  Part of exon 35 of the human dystrophin transcript
ugggcaagaaggagacguugguggaaga

SEQ ID NO: 1307 - RNA, 27 nt, Artificial
  Part of exon 37 of the human dystrophin transcript
ugaccaagcagcaaacuugauggcaaa

SEQ ID NO: 1308 - RNA, 81 nt, Artificial
  Part of exon 35 of the human dystrophin transcript
gcuacucaaaaagagauugagaaacagaaggugcaccugaagaguaucacagagguaggagaggccuugaaaacaguuuug

SEQ ID NO: 1309 - RNA, 84 nt, Artificial
  Part of exon 38 of the human dystrophin transcript
gauauacaaaaauugcuugaaccacuggaggcugaaauucagcagggggugaaucugaaagaggaagacuucaauaaagauaug

SEQ ID NO: 1310 - RNA, 63 nt, Artificial
  Part of exon 35 of the human dystrophin transcript
gcuacucaaaaagagauugagaaacagaaggugcaccugaagaguaucacagagguaggagag

SEQ ID NO: 1311 - RNA, 66 nt, Artificial
  Part of exon 39 of the human dystrophin transcript
gguacuguaaaagaauuguugcaaagaggagacaacuuacaacaaagaaucacagaugagagaaag

SEQ ID NO: 1312 - RNA, 61 nt, Artificial
  Part of exon 35 of the human dystrophin transcript
cucaaaaagagauugagaaacagaaggugcaccugaagaguaucacagagguaggagaggc

SEQ ID NO: 1313 - RNA, 57 nt, Artificial
  Part of exon 40 of the human dystrophin transcript
cucaaagaagaaaaaaggcucuagaaauuucucaucagugguaucaguacaagaggc

SEQ ID NO: 1314 - RNA, 67 nt, Artificial
  Part of exon 35 of the human dystrophin transcript
gaguaucacagagguaggagaggccuugaaaacaguuuugggcaagaaggagacguugguggaagau

SEQ ID NO: 1315 - RNA, 68 nt, Artificial
  Part of exon 41 of the human dystrophin transcript
gggaauugcagaagaagaaagaggagcugaaugcagugcguaggcaagcugagggcuugucugaggau

SEQ ID NO: 1316 - RNA, 37 nt, Artificial
  Part of exon 35 of the human dystrophin transcript
ggccuugaaaacaguuuugggcaagaaggagacguug

SEQ ID NO: 1317 - RNA, 36 nt, Artificial
  Part of exon 42 of the human dystrophin transcript
gacuuugaagaucucuuuaagcaagaggagucucug

SEQ ID NO: 1318 - RNA, 46 nt, Artificial
  Part of exon 35 of the human dystrophin transcript
aaaaagagauugagaaacagaaggugcaccugaagaguaucacaga

SEQ ID NO: 1319 - RNA, 48 nt, Artificial
  Part of exon 44 of the human dystrophin transcript
auaaagauauuuaaucaguggcuaacagaagcugaacaguuucucaga

SEQ ID NO: 1320 - RNA, 30 nt, Artificial
  Part of exon 35 of the human dystrophin transcript
gcuacucaaaaagagauugagaaacagaag

SEQ ID NO: 1321 - RNA, 31 nt, Artificial
  Part of exon 46 of the human dystrophin transcript
gcaacuaaaagaaaagcuugagcaagucaag

SEQ ID NO: 1322 - RNA, 38 nt, Artificial
  Part of exon 35 of the human dystrophin transcript
uggaagauaaacucagucuucugaauaguaacuggaua

SEQ ID NO: 1323 - RNA, 38 nt, Artificial
  Part of exon 47 of the human dystrophin transcript
uugaaaauaagcucaagcagacaaaucuccaguggaua

SEQ ID NO: 1324 - RNA, 64 nt, Artificial
  Part of exon 35 of the human dystrophin transcript
ugagaaacagaaggugcaccugaagaguaucacagagguaggagaggccuugaaaacaguuuug

SEQ ID NO: 1325 - RNA, 62 nt, Artificial
  Part of exon 48 of the human dystrophin transcript
ugagaaacaaggagaaauugaagcucaaauaaaagaccuugggcagcuugaaaaaaagcuug

SEQ ID NO: 1326 - RNA, 47 nt, Artificial
  Part of exon 35 of the human dystrophin transcript
aacaguuuugggcaagaaggagacguugguggaagauaaacucaguc

SEQ ID NO: 1327 - RNA, 47 nt, Artificial
  Part of exon 49 of the human dystrophin transcript
aagagauuuugucuaaagggcagcauuuguacaaggaaaaaccagcc

SEQ ID NO: 1328 - RNA, 49 nt, Artificial
  Part of exon 35 of the human dystrophin transcript
aaaaagagauugagaaacagaaggugcaccugaagaguaucacagaggu

SEQ ID NO: 1329 - RNA, 48 nt, Artificial
  Part of exon 51 of the human dystrophin transcript
aaaaucacagagggugauggugggugaccuugaggauaucaacgagau

SEQ ID NO: 1330 - RNA, 32 nt, Artificial
  Part of exon 35 of the human dystrophin transcript
aaacagaaggugcaccugaagaguaucacaga

SEQ ID NO: 1331 - RNA, 34 nt, Artificial
  Part of exon 53 of the human dystrophin transcript
auacaguagaugcaauccaaaagaaaaucacaga

SEQ ID NO: 1332 - RNA, 18 nt, Artificial
  Part of exon 35 of the human dystrophin transcript
aaaagagauugagaaaca

SEQ ID NO: 1333 - RNA, 18 nt, Artificial
  Part of exon 55 of the human dystrophin transcript
aaaagagcugaugaaaca

SEQ ID NO: 1334 - RNA, 37 nt, Artificial
  Part of exon 35 of the human dystrophin transcript
uaggagaggccuugaaaacaguuuugggcaagaagga

SEQ ID NO: 1335 - RNA, 37 nt, Artificial
  Part of exon 57 of the human dystrophin transcript
uuggaggcgacuuuccagcaguucagaagcagaacga

SEQ ID NO: 1336 - RNA, 67 nt, Artificial
  Part of exon 35 of the human dystrophin transcript
ucaaaaagagauugagaaacagaaggugcaccugaagaguaucacagagguaggagaggccuugaaa

SEQ ID NO: 1337 - RNA, 72 nt, Artificial
  Part of exon 59 of the human dystrophin transcript
ucaauacugagugggaaaaauugaaccugcacuccgcugacuggcagagaaaaauagaugagacccuugaaa

SEQ ID NO: 1338 - RNA, 35 nt, Artificial
  Part of exon 35 of the human dystrophin transcript
ucaaaaagagauugagaaacagaaggugcaccuga

SEQ ID NO: 1339 - RNA, 35 nt, Artificial
  Part of exon 60 of the human dystrophin transcript
ucgaggagaaauugcgccucugaaagagaacguga

SEQ ID NO: 1340 - RNA, 33 nt, Artificial
  Part of exon 36 of the human dystrophin transcript
acuuuugaccagaauguggaccacaucacaaag

SEQ ID NO: 1341 - RNA, 36 nt, Artificial
  Part of exon 37 of the human dystrophin transcript
acauacgcccaaagguggacucuacacgugaccaag

SEQ ID NO: 1342 - RNA, 54 nt, Artificial
  Part of exon 36 of the human dystrophin transcript
aggcugacacacuuuuggaugaaucagagaaaaagaaaccccagcaaaaagaag

SEQ ID NO: 1343 - RNA, 56 nt, Artificial
  Part of exon 38 of the human dystrophin transcript
aggcugaaauucagcagggggugaaucugaaagaggaagacuucaauaaagauaug

SEQ ID NO: 1344 - RNA, 37 nt, Artificial
  Part of exon 36 of the human dystrophin transcript
augaaucagagaaaaagaaaccccagcaaaaagaaga

SEQ ID NO: 1345 - RNA, 38 nt, Artificial
  Part of exon 39 of the human dystrophin transcript
aagaaucacagaugagagaaagcgagaggaaauaaaga

SEQ ID NO: 1346 - RNA, 23 nt, Artificial
  Part of exon 36 of the human dystrophin transcript
uuggaugaaucagagaaaaagaa

SEQ ID NO: 1347 - RNA, 21 nt, Artificial
  Part of exon 40 of the human dystrophin transcript
uuggaugacauugaaaaaaaa

SEQ ID NO: 1348 - RNA, 34 nt, Artificial
  Part of exon 36 of the human dystrophin transcript
gaaucagagaaaaagaaaccccagcaaaaagaag

SEQ ID NO: 1349 - RNA, 34 nt, Artificial
  Part of exon 41 of the human dystrophin transcript
gaauugcagaagaagaaagaggagcugaaugcag

SEQ ID NO: 1350 - RNA, 23 nt, Artificial
  Part of exon 36 of the human dystrophin transcript
agaauguggaccacaucacaaag

SEQ ID NO: 1351 - RNA, 23 nt, Artificial
  Part of exon 42 of the human dystrophin transcript
agaaguggaacaacuucucaaug

SEQ ID NO: 1352 - RNA, 76 nt, Artificial
  Part of exon 36 of the human dystrophin transcript
aguggaucauucaggcugacacacuuuuggaugaaucagagaaaaagaaaccccagcaaaaagaagacgugcuuaa

SEQ ID NO: 1353 - RNA, 68 nt, Artificial
  Part of exon 44 of the human dystrophin transcript
aguggcuaacagaagcugaacaguuucucagaaagacacaaauuccugagaauugggaacaugcuaaa

SEQ ID NO: 1354 - RNA, 30 nt, Artificial
  Part of exon 36 of the human dystrophin transcript
aaaccccagcaaaaagaagacgugcuuaag

SEQ ID NO: 1355 - RNA, 30 nt, Artificial
  Part of exon 46 of the human dystrophin transcript
aaagagcagcaacuaaaagaaaagcuugag

SEQ ID NO: 1356 - RNA, 22 nt, Artificial
  Part of exon 36 of the human dystrophin transcript
aaaagaaaccccagcaaaaaga

SEQ ID NO: 1357 - RNA, 22 nt, Artificial
  Part of exon 47 of the human dystrophin transcript
aaaauaagcucaagcagacaaa

SEQ ID NO: 1358 - RNA, 24 nt, Artificial
  Part of exon 36 of the human dystrophin transcript
gaaacacauggaaacuuuugacca

SEQ ID NO: 1359 - RNA, 24 nt, Artificial
  Part of exon 48 of the human dystrophin transcript
gaaucaguuggaaauuuauaacca

SEQ ID NO: 1360 - RNA, 18 nt, Artificial
  Part of exon 36 of the human dystrophin transcript
aaaaagaaaccccagcaa

SEQ ID NO: 1361 - RNA, 18 nt, Artificial
  Part of exon 49 of the human dystrophin transcript
acaaggaaaaaccagcca

SEQ ID NO: 1362 - RNA, 34 nt, Artificial
  Part of exon 36 of the human dystrophin transcript
uggaccacaucacaaaguggaucauucaggcuga

SEQ ID NO: 1363 - RNA, 33 nt, Artificial
  Part of exon 51 of the human dystrophin transcript
uugaggauaucaacgagaugaucaucaagcaga

SEQ ID NO: 1364 - RNA, 32 nt, Artificial
  Part of exon 36 of the human dystrophin transcript
cagaaacacauggaaacuuuugaccagaaugu

SEQ ID NO: 1365 - RNA, 31 nt, Artificial
  Part of exon 53 of the human dystrophin transcript
cagaaccggaggcaacaguugaaugaaaugu

SEQ ID NO: 1366 - RNA, 53 nt, Artificial
  Part of exon 36 of the human dystrophin transcript
cagaauguggaccacaucacaaaguggaucauucaggcugacacacuuuugga

SEQ ID NO: 1367 - RNA, 49 nt, Artificial
  Part of exon 55 of the human dystrophin transcript
cagaagcugaaacaacugccaauguccuacaggaugcuacccguaagga

SEQ ID NO: 1368 - RNA, 50 nt, Artificial
  Part of exon 36 of the human dystrophin transcript
uguggaccacaucacaaaguggaucauucaggcugacacacuuuuggaug

SEQ ID NO: 1369 - RNA, 52 nt, Artificial
  Part of exon 57 of the human dystrophin transcript
uguggcuacagcugaaagaugaugaauuaagccggcaggcaccuauuggagg

SEQ ID NO: 1370 - RNA, 74 nt, Artificial
  Part of exon 36 of the human dystrophin transcript
accagaauguggaccacaucacaaaguggaucauucaggcugacacacuuuuggaugaaucagagaaaaagaaa

SEQ ID NO: 1371 - RNA, 73 nt, Artificial
  Part of exon 59 of the human dystrophin transcript
agcaggcugaggaggucaauacugagugggaaaaauugaaccugcacuccgcugacuggcagagaaaaauaga

SEQ ID NO: 1372 - RNA, 28 nt, Artificial
  Part of exon 36 of the human dystrophin transcript
gaauaccagaaacacauggaaacuuuug

SEQ ID NO: 1373 - RNA, 30 nt, Artificial
  Part of exon 60 of the human dystrophin transcript
gaagaccugaacaccagauggaagcuucug

SEQ ID NO: 1374 - RNA, 27 nt, Artificial
  Part of exon 37 of the human dystrophin transcript
gauuugcagccauuucacacagaauua

SEQ ID NO: 1375 - RNA, 27 nt, Artificial
  Part of exon 38 of the human dystrophin transcript
gaauuggagcaguuuaacucagauaua

SEQ ID NO: 1376 - RNA, 19 nt, Artificial
  Part of exon 37 of the human dystrophin transcript
uuaaaggcagaacugaaug

SEQ ID NO: 1377 - RNA, 19 nt, Artificial
  Part of exon 39 of the human dystrophin transcript
uuacagacaaaacauaaug

SEQ ID NO: 1378 - RNA, 32 nt, Artificial
  Part of exon 37 of the human dystrophin transcript
aaauuaguagagccccaaaucucagagcucaa

SEQ ID NO: 1379 - RNA, 33 nt, Artificial
  Part of exon 40 of the human dystrophin transcript
aaauuagccagccuaccugagcccagagaugaa

SEQ ID NO: 1380 - RNA, 58 nt, Artificial
  Part of exon 37 of the human dystrophin transcript
aguagagccccaaaucucagagcucaaccaucgauuugcagccauuucacacagaauu

SEQ ID NO: 1381 - RNA, 57 nt, Artificial
  Part of exon 41 of the human dystrophin transcript
aguggagccaacucagauccagcucagcaagcgcuggcgggaaauugagagcaaauu

SEQ ID NO: 1382 - RNA, 28 nt, Artificial
  Part of exon 37 of the human dystrophin transcript
auuaguagagccccaaaucucagagcuc

SEQ ID NO: 1383 - RNA, 29 nt, Artificial
  Part of exon 42 of the human dystrophin transcript
auuagaaguggaacaacuucucaaugcuc

SEQ ID NO: 1384 - RNA, 19 nt, Artificial
  Part of exon 37 of the human dystrophin transcript
agagccccaaaucucagag

SEQ ID NO: 1385 - RNA, 19 nt, Artificial
  Part of exon 44 of the human dystrophin transcript
aaagacacaaauuccugag

SEQ ID NO: 1386 - RNA, 42 nt, Artificial
  Part of exon 37 of the human dystrophin transcript
agagcucaaccaucgauuugcagccauuucacacagaauuaa

SEQ ID NO: 1387 - RNA, 41 nt, Artificial
  Part of exon 46 of the human dystrophin transcript
agaacaaaagaauaucuugucagaauuucaaagagauuuaa

SEQ ID NO: 1388 - RNA, 30 nt, Artificial
  Part of exon 37 of the human dystrophin transcript
cauacgcccaaagguggacucuacacguga

SEQ ID NO: 1389 - RNA, 30 nt, Artificial
  Part of exon 47 of the human dystrophin transcript
cauaagcccagaagagcaagauaaacuuga

SEQ ID NO: 1390 - RNA, 27 nt, Artificial
  Part of exon 37 of the human dystrophin transcript
uuugcagccauuucacacagaauuaag

SEQ ID NO: 1391 - RNA, 27 nt, Artificial
  Part of exon 48 of the human dystrophin transcript
uuuccagagcuuuaccugagaaacaag

SEQ ID NO: 1392 - RNA, 19 nt, Artificial
  Part of exon 37 of the human dystrophin transcript
gcagccauuucacacagaa

SEQ ID NO: 1393 - RNA, 19 nt, Artificial
  Part of exon 49 of the human dystrophin transcript
gcagcauuuguacaaggaa

SEQ ID NO: 1394 - RNA, 16 nt, Artificial
  Part of exon 37 of the human dystrophin transcript
aaaucucagagcucaa

SEQ ID NO: 1395 - RNA, 16 nt, Artificial
  Part of exon 53 of the human dystrophin transcript
aaaucacagaaaccaa

SEQ ID NO: 1396 - RNA, 55 nt, Artificial
  Part of exon 37 of the human dystrophin transcript
caagcagcaaacuugauggcaaaccgcggugaccacugcaggaaauuaguagagc

SEQ ID NO: 1397 - RNA, 55 nt, Artificial
  Part of exon 55 of the human dystrophin transcript
caggaugcuacccguaaggaaaggcuccuagaagacuccaagggaguaaaagagc

SEQ ID NO: 1398 - RNA, 28 nt, Artificial
  Part of exon 37 of the human dystrophin transcript
guuuaaaggcagaacugaaugacauacg

SEQ ID NO: 1399 - RNA, 27 nt, Artificial
  Part of exon 57 of the human dystrophin transcript
guucagaagcagaacgauguacauagg

SEQ ID NO: 1400 - RNA, 52 nt, Artificial
  Part of exon 37 of the human dystrophin transcript
gcaaacuugauggcaaaccgcggugaccacugcaggaaauuaguagagcccc

SEQ ID NO: 1401 - RNA, 52 nt, Artificial
  Part of exon 59 of the human dystrophin transcript
gaaaaauugaaccugcacuccgcugacuggcagagaaaaauagaugagaccc

SEQ ID NO: 1402 - RNA, 79 nt, Artificial
  Part of exon 37 of the human dystrophin transcript
acgugaccaagcagcaaacuugauggcaaaccgcggugaccacugcaggaaauuaguagagccccaaaucucagagcuc

SEQ ID NO: 1403 - RNA, 78 nt, Artificial
  Part of exon 60 of the human dystrophin transcript
acgugagccacgucaaugaccuugcucgccagcuuaccacuuugggcauucagcucucaccguauaaccucagcacuc

SEQ ID NO: 1404 - RNA, 80 nt, Artificial
  Part of exon 38 of the human dystrophin transcript
uauacaaaaauugcuugaaccacuggaggcugaaauucagcagggggugaaucugaaagaggaagacuucaauaaagaua

SEQ ID NO: 1405 - skipped

SEQ ID NO: 1406 - RNA, 79 nt, Artificial
  Part of exon 39 of the human dystrophin transcript
uguaaaagaauuguugcaaagaggagacaacuuacaacaaagaaucacagaugagagaaagcgagaggaaauaaagaua

SEQ ID NO: 1407 - RNA, 42 nt, Artificial
  Part of exon 38 of the human dystrophin transcript
aggcugaaauucagcagggggugaaucugaaagaggaagacu

SEQ ID NO: 1408 - RNA, 47 nt, Artificial
  Part of exon 40 of the human dystrophin transcript
aggcucuagaaauuucucaucagugguaucaguacaagaggcaggcu

SEQ ID NO: 1409 - RNA, 34 nt, Artificial
  Part of exon 38 of the human dystrophin transcript
aauuggagcaguuuaacucagauauacaaaaauu

SEQ ID NO: 1410 - RNA, 38 nt, Artificial
  Part of exon 41 of the human dystrophin transcript
aauuugcucaguuucgaagacucaacuuugcacaaauu

SEQ ID NO: 1411 - RNA, 22 nt, Artificial
  Part of exon 38 of the human dystrophin transcript
uucagcagggggugaaucugaa

SEQ ID NO: 1412 - RNA, 22 nt, Artificial
  Part of exon 42 of the human dystrophin transcript
uuaagcaagaggagucucugaa

SEQ ID NO: 1413 - RNA, 38 nt, Artificial
  Part of exon 38 of the human dystrophin transcript
gaauuggagcaguuuaacucagauauacaaaaauugcu

SEQ ID NO: 1414 - RNA, 36 nt, Artificial
  Part of exon 44 of the human dystrophin transcript
gaagcugaacaguuucucagaaagacacaaauuccu

SEQ ID NO: 1415 - RNA, 37 nt, Artificial
  Part of exon 38 of the human dystrophin transcript
aaaauugcuugaaccacuggaggcugaaauucagcag

SEQ ID NO: 1416 - RNA, 39 nt, Artificial
  Part of exon 46 of the human dystrophin transcript
aacauugcuaguaucccacuugaaccuggaaaagagcag

SEQ ID NO: 1417 - RNA, 24 nt, Artificial
  Part of exon 38 of the human dystrophin transcript
aaaaauugcuugaaccacuggagg

SEQ ID NO: 1418 - RNA, 22 nt, Artificial
  Part of exon 47 of the human dystrophin transcript
aacaauuaaaugaaacuggagg

SEQ ID NO: 1419 - RNA, 23 nt, Artificial
  Part of exon 38 of the human dystrophin transcript
uugaaggaauuggagcaguuuaa

SEQ ID NO: 1420 - RNA, 25 nt, Artificial
  Part of exon 48 of the human dystrophin transcript
uugaagaccuugaagagcaguuaaa

SEQ ID NO: 1421 - RNA, 15 nt, Artificial
  Part of exon 38 of the human dystrophin transcript
gaaucugaaagagga

SEQ ID NO: 1422 - RNA, 15 nt, Artificial
  Part of exon 49 of the human dystrophin transcript
gaaacugaaauagca

SEQ ID NO: 1423 - RNA, 18 nt, Artificial
  Part of exon 38 of the human dystrophin transcript
aaauucagcaggggguga

SEQ ID NO: 1424 - RNA, 17 nt, Artificial
  Part of exon 51 of the human dystrophin transcript
aaaaucacagaggguga

SEQ ID NO: 1425 - RNA, 59 nt, Artificial
  Part of exon 38 of the human dystrophin transcript
uugaaggaauuggagcaguuuaacucagauauacaaaaauugcuugaaccacuggaggc

SEQ ID NO: 1426 - RNA, 57 nt, Artificial
  Part of exon 53 of the human dystrophin transcript
uugaaagaauucagaaucagugggaugaaguacaagaacaccuucagaaccggaggc

SEQ ID NO: 1427 - RNA, 56 nt, Artificial
  Part of exon 38 of the human dystrophin transcript
auuggagcaguuuaacucagauauacaaaaauugcuugaaccacuggaggcugaaa

SEQ ID NO: 1428 - RNA, 59 nt, Artificial
  Part of exon 55 of the human dystrophin transcript
acugcaacaguucccccuggaccuggaaaaguuucuugccuggcuuacagaagcugaaa

SEQ ID NO: 1429 - RNA, 40 nt, Artificial
  Part of exon 38 of the human dystrophin transcript
gaaauucagcagggggugaaucugaaagaggaagacuuca

SEQ ID NO: 1430 - RNA, 40 nt, Artificial
  Part of exon 57 of the human dystrophin transcript
gaacuucugguguggcuacagcugaaagaugaugaauuaa

SEQ ID NO: 1431 - RNA, 31 nt, Artificial
  Part of exon 38 of the human dystrophin transcript
agggggugaaucugaaagaggaagacuucaa

SEQ ID NO: 1432 - RNA, 31 nt, Artificial
  Part of exon 59 of the human dystrophin transcript
aggaggucaauacugagugggaaaaauugaa

SEQ ID NO: 1433 - RNA, 14 nt, Artificial
  Part of exon 38 of the human dystrophin transcript
ucugaaagaggaag

SEQ ID NO: 1434 - RNA, 14 nt, Artificial
  Part of exon 60 of the human dystrophin transcript
ucugaaagagaacg

SEQ ID NO: 1435 - RNA, 19 nt, Artificial
  Part of exon 39 of the human dystrophin transcript
gagaggaaauaaagauaaa

SEQ ID NO: 1436 - RNA, 19 nt, Artificial
  Part of exon 40 of the human dystrophin transcript
gagaugaaaggaaaauaaa

SEQ ID NO: 1437 - RNA, 53 nt, Artificial
  Part of exon 39 of the human dystrophin transcript
agaggagacaacuuacaacaaagaaucacagaugagagaaagcgagaggaaau

SEQ ID NO: 1438 - RNA, 56 nt, Artificial
  Part of exon 41 of the human dystrophin transcript
aguggagccaacucagauccagcucagcaagcgcuggcgggaaauugagagcaaau

SEQ ID NO: 1439 - RNA, 33 nt, Artificial
  Part of exon 39 of the human dystrophin transcript
aggaaauaaagauaaaacagcagcuguuacaga

SEQ ID NO: 1440 - RNA, 34 nt, Artificial
  Part of exon 44 of the human dystrophin transcript
augauauaaagauauuuaaucaguggcuaacaga

SEQ ID NO: 1441 - RNA, 48 nt, Artificial
  Part of exon 39 of the human dystrophin transcript
aacuuacaacaaagaaucacagaugagagaaagcgagaggaaauaaag

SEQ ID NO: 1442 - RNA, 47 nt, Artificial
  Part of exon 46 of the human dystrophin transcript
aaccuggaaaagagcagcaacuaaaagaaaagcuugagcaagucaag

SEQ ID NO: 1443 - RNA, 111 nt, Artificial
  Part of exon 39 of the human dystrophin transcript
aggguacuguaaaagaauuguugcaaagaggagacaacuuacaacaaagaaucacagaugagagaaagcgagaggaaauaaagauaaaacagcagcuguuacagacaaaac

SEQ ID NO: 1444 - RNA, 108 nt, Artificial
  Part of exon 47 of the human dystrophin transcript
agggaauucucaaacaauuaaaugaaacuggaggacccgugcuuguaagugcucccauaagcccagaagagcaagauaaacuugaaaauaagcucaagcagacaaauc

SEQ ID NO: 1445 - RNA, 34 nt, Artificial
  Part of exon 39 of the human dystrophin transcript
gagaaagcgagaggaaauaaagauaaaacagcag

SEQ ID NO: 1446 - RNA, 34 nt, Artificial
  Part of exon 48 of the human dystrophin transcript
gagaaacaaggagaaauugaagcucaaauaaaag

SEQ ID NO: 1447 - RNA, 47 nt, Artificial
  Part of exon 39 of the human dystrophin transcript
uguaaaagaauuguugcaaagaggagacaacuuacaacaaagaauca

SEQ ID NO: 1448 - RNA, 47 nt, Artificial
  Part of exon 49 of the human dystrophin transcript
uggaagagauuuugucuaaagggcagcauuuguacaaggaaaaacca

SEQ ID NO: 1449 - RNA, 41 nt, Artificial
  Part of exon 39 of the human dystrophin transcript
aaagaaucacagaugagagaaagcgagaggaaauaaagaua

SEQ ID NO: 1450 - RNA, 40 nt, Artificial
  Part of exon 51 of the human dystrophin transcript
auaaaaucacagagggugauggugggugaccuugaggaua

SEQ ID NO: 1451 - RNA, 114 nt, Artificial
  Part of exon 39 of the human dystrophin transcript
aaugaagacaaugaggguacuguaaaagaauuguugcaaagaggagacaacuuacaacaaagaaucacagaugagagaaagcgagaggaaauaaagauaaaacagcagcuguua

SEQ ID NO: 1452 - RNA, 121 nt, Artificial
  Part of exon 53 of the human dystrophin transcript
aauucagaaucagugggaugaaguacaagaacaccuucagaaccggaggcaacaguugaaugaaauguuaaaggauucaacacaauggcuggaagcuaaggaagaagcugagcaggucuua

SEQ ID NO: 1453 - RNA, 36 nt, Artificial
  Part of exon 39 of the human dystrophin transcript
gaagacaaugaggguacuguaaaagaauuguugcaa

SEQ ID NO: 1454 - RNA, 33 nt, Artificial
  Part of exon 55 of the human dystrophin transcript
gaagacuccaagggaguaaaagagcugaugaaa

SEQ ID NO: 1455 - RNA, 20 nt, Artificial
  Part of exon 39 of the human dystrophin transcript
guuacagacaaaacauaaug

SEQ ID NO: 1456 - RNA, 20 nt, Artificial
  Part of exon 57 of the human dystrophin transcript
gcuacagcugaaagaugaug

SEQ ID NO: 1457 - RNA, 19 nt, Artificial
  Part of exon 39 of the human dystrophin transcript
caaagaaucacagaugaga

SEQ ID NO: 1458 - RNA, 19 nt, Artificial
  Part of exon 59 of the human dystrophin transcript
cagagaaaaauagaugaga

SEQ ID NO: 1459 - RNA, 16 nt, Artificial
  Part of exon 39 of the human dystrophin transcript
ugagagaaagcgagag

SEQ ID NO: 1460 - RNA, 16 nt, Artificial
  Part of exon 60 of the human dystrophin transcript
ugaaagagaacgugag

SEQ ID NO: 1461 - RNA, 40 nt, Artificial
  Part of exon 40 of the human dystrophin transcript
aucuccugaaaugcuuggaugacauugaaaaaaaauuagc

SEQ ID NO: 1462 - RNA, 40 nt, Artificial
  Part of exon 41 of the human dystrophin transcript
agcucagcaagcgcuggcgggaaauugagagcaaauuugc

SEQ ID NO: 1463 - RNA, 25 nt, Artificial
  Part of exon 40 of the human dystrophin transcript
aaaaaaggcucuagaaauuucucau

SEQ ID NO: 1464 - RNA, 25 nt, Artificial
  Part of exon 42 of the human dystrophin transcript
agacaugccuuuggaaauuucuuau

SEQ ID NO: 1465 - RNA, 34 nt, Artificial
  Part of exon 40 of the human dystrophin transcript
aggcucuagaaauuucucaucagugguaucagua

SEQ ID NO: 1466 - RNA, 35 nt, Artificial
  Part of exon 44 of the human dystrophin transcript
augauauaaagauauuuaaucaguggcuaacagaa

SEQ ID NO: 1467 - RNA, 79 nt, Artificial
  Part of exon 40 of the human dystrophin transcript
augaucuccugaaaugcuuggaugacauugaaaaaaaauuagccagccuaccugagcccagagaugaaaggaaaauaaa

SEQ ID NO: 1468 - RNA, 79 nt, Artificial
  Part of exon 46 of the human dystrophin transcript
augaauuuguuuuaugguuggaggaagcagauaacauugcuaguaucccacuugaaccuggaaaagagcagcaacuaaa

SEQ ID NO: 1469 - RNA, 38 nt, Artificial
  Part of exon 40 of the human dystrophin transcript
aaagaagaaaaaaggcucuagaaauuucucaucagugg

SEQ ID NO: 1470 - RNA, 39 nt, Artificial
  Part of exon 47 of the human dystrophin transcript
aaacuugaaaauaagcucaagcagacaaaucuccagugg

SEQ ID NO: 1471 - RNA, 30 nt, Artificial
  Part of exon 40 of the human dystrophin transcript
aaaugcuuggaugacauugaaaaaaaauua

SEQ ID NO: 1472 - RNA, 29 nt, Artificial
  Part of exon 48 of the human dystrophin transcript
aaaagcuugaagaccuugaagagcaguua

SEQ ID NO: 1473 - RNA, 39 nt, Artificial
  Part of exon 40 of the human dystrophin transcript
uugaaaaaaaauuagccagccuaccugagcccagagaug

SEQ ID NO: 1474 - RNA, 36 nt, Artificial
  Part of exon 49 of the human dystrophin transcript
uuguacaaggaaaaaccagccacucagccagugaag

SEQ ID NO: 1475 - RNA, 13 nt, Artificial
  Part of exon 40 of the human dystrophin transcript
uggaugacauuga

SEQ ID NO: 1476 - RNA, 13 nt, Artificial
  Part of exon 51 of the human dystrophin transcript
ugggugaccuuga

SEQ ID NO: 1477 - RNA, 72 nt, Artificial
  Part of exon 40 of the human dystrophin transcript
aauuucucaucagugguaucaguacaagaggcaggcugaugaucuccugaaaugcuuggaugacauugaaaa

SEQ ID NO: 1478 - RNA, 72 nt, Artificial
  Part of exon 53 of the human dystrophin transcript
aauucagaaucagugggaugaaguacaagaacaccuucagaaccggaggcaacaguugaaugaaauguuaaa

SEQ ID NO: 1479 - RNA, 34 nt, Artificial
  Part of exon 40 of the human dystrophin transcript
uugaggucucaaagaagaaaaaaggcucuagaaa

SEQ ID NO: 1480 - RNA, 35 nt, Artificial
  Part of exon 55 of the human dystrophin transcript
uagaagacuccaagggaguaaaagagcugaugaaa

SEQ ID NO: 1481 - RNA, 23 nt, Artificial
  Part of exon 40 of the human dystrophin transcript
agaaauuucucaucagugguauc

SEQ ID NO: 1482 - RNA, 23 nt, Artificial
  Part of exon 57 of the human dystrophin transcript
agccaguucugaccaguggaagc

SEQ ID NO: 1483 - RNA, 136 nt, Artificial
  Part of exon 40 of the human dystrophin transcript
aagaaaaaaggcucuagaaauuucucaucagugguaucaguacaagaggcaggcugaugaucuccugaaaugcuuggaugacauugaaaaaaaauuagccagccuaccugagcccagagaugaaaggaaaauaaag

SEQ ID NO: 1484 - RNA, 136 nt, Artificial
  Part of exon 59 of the human dystrophin transcript
acgaaagcaggcugaggaggucaauacugagugggaaaaauugaaccugcacuccgcugacuggcagagaaaaauagaugagacccuugaaagacuccaggaacuucaagaggccacggaugagcuggaccucaag

SEQ ID NO: 1485 - RNA, 48 nt, Artificial
  Part of exon 40 of the human dystrophin transcript
agaaauuucucaucagugguaucaguacaagaggcaggcugaugaucu

SEQ ID NO: 1486 - RNA, 45 nt, Artificial
  Part of exon 60 of the human dystrophin transcript
agaaauugcgccucugaaagagaacgugagccacgucaaugaccu

SEQ ID NO: 1487 - RNA, 17 nt, Artificial
  Part of exon 41 of the human dystrophin transcript
aagaaagaggagcugaa

SEQ ID NO: 1488 - RNA, 20 nt, Artificial
  Part of exon 42 of the human dystrophin transcript
aagcaagaggagucucugaa

SEQ ID NO: 1489 - RNA, 28 nt, Artificial
  Part of exon 41 of the human dystrophin transcript
aauuugcucaguuucgaagacucaacuu

SEQ ID NO: 1490 - RNA, 32 nt, Artificial
  Part of exon 44 of the human dystrophin transcript
aagcugaacaguuucucagaaagacacaaauu

SEQ ID NO: 1491 - RNA, 35 nt, Artificial
  Part of exon 41 of the human dystrophin transcript
gaagaaagaggagcugaaugcagugcguaggcaag

SEQ ID NO: 1492 - RNA, 36 nt, Artificial
  Part of exon 46 of the human dystrophin transcript
gaaaagagcagcaacuaaaagaaaagcuugagcaag

SEQ ID NO: 1493 - RNA, 41 nt, Artificial
  Part of exon 41 of the human dystrophin transcript
gggaauugcagaagaagaaagaggagcugaaugcagugcgu

SEQ ID NO: 1494 - RNA, 43 nt, Artificial
  Part of exon 47 of the human dystrophin transcript
gggaauucucaaacaauuaaaugaaacuggaggacccgugcuu

SEQ ID NO: 1495 - RNA, 22 nt, Artificial
  Part of exon 41 of the human dystrophin transcript
agaagaagaaagaggagcugaa

SEQ ID NO: 1496 - RNA, 22 nt, Artificial
  Part of exon 48 of the human dystrophin transcript
acaaggagaaauugaagcucaa

SEQ ID NO: 1497 - RNA, 31 nt, Artificial; identical to SEQ ID NO: 645
  Part of exon 41 of the human dystrophin transcript

SEQ ID NO: 1498 - RNA, 31 nt, Artificial
  Part of exon 49 of the human dystrophin transcript
caguucaagcuaaacaaccggauguggaaga

SEQ ID NO: 1499 - RNA, 96 nt, Artificial
  Part of exon 41 of the human dystrophin transcript
aauugcagaagaagaaagaggagcugaaugcagugcguaggcaagcugagggcuugucugaggauggggccgcaauggcaguggagccaacucaga

SEQ ID NO: 1500 - RNA, 102 nt, Artificial
  Part of exon 53 of the human dystrophin transcript
aauggcuggaagcuaaggaagaagcugagcaggucuuaggacaggccagagccaagcuugagucauggaaggagggucccuauacaguagaugcaauccaaa

SEQ ID NO: 1501 - RNA, 17 nt, Artificial
  Part of exon 41 of the human dystrophin transcript
uugcagaagaagaaaga

SEQ ID NO: 1502 - RNA, 17 nt, Artificial
  Part of exon 55 of the human dystrophin transcript
uuacagaagcugaaaca

SEQ ID NO: 1503 - RNA, 48 nt, Artificial
  Part of exon 41 of the human dystrophin transcript
ucgggaauugcagaagaagaaagaggagcugaaugcagugcguaggca

SEQ ID NO: 1504 - RNA, 46 nt, Artificial
  Part of exon 57 of the human dystrophin transcript
ucugguguggcuacagcugaaagaugaugaauuaagccggcaggca

SEQ ID NO: 1505 - RNA, 55 nt, Artificial
  Part of exon 41 of the human dystrophin transcript
cgggaauugcagaagaagaaagaggagcugaaugcagugcguaggcaagcugagg

SEQ ID NO: 1506 - RNA, 55 nt, Artificial
  Part of exon 59 of the human dystrophin transcript
caggaacuucaagaggccacggaugagcuggaccucaagcugcgccaagcugagg

SEQ ID NO: 1507 - RNA, 28 nt, Artificial
  Part of exon 41 of the human dystrophin transcript
gagccaacucagauccagcucagcaagc

SEQ ID NO: 1508 - RNA, 29 nt, Artificial
  Part of exon 60 of the human dystrophin transcript
gagccacgucaaugaccuugcucgccagc

SEQ ID NO: 1509 - RNA, 25 nt, Artificial
  Part of exon 42 of the human dystrophin transcript
cuauuagaaguggaacaacuucuca

SEQ ID NO: 1510 - RNA, 25 nt, Artificial
  Part of exon 44 of the human dystrophin transcript
cuaacagaagcugaacaguuucuca

SEQ ID NO: 1511 - RNA, 45 nt, Artificial
  Part of exon 42 of the human dystrophin transcript
ugaaaucacucaugucucacaagcccuauuagaaguggaacaacu

SEQ ID NO: 1512 - RNA, 45 nt, Artificial
  Part of exon 46 of the human dystrophin transcript
uaacauugcuaguaucccacuugaaccuggaaaagagcagcaacu

SEQ ID NO: 1513 - RNA, 38 nt, Artificial
  Part of exon 42 of the human dystrophin transcript
ucucacaagcccuauuagaaguggaacaacuucucaau

SEQ ID NO: 1514 - RNA, 37 nt, Artificial
  Part of exon 47 of the human dystrophin transcript
ucccauaagcccagaagagcaagauaaacuugaaaau

SEQ ID NO: 1515 - RNA, 27 nt, Artificial
  Part of exon 42 of the human dystrophin transcript
uaaggacuuugaagaucucuuuaagca

SEQ ID NO: 1516 - RNA, 27 nt, Artificial
  Part of exon 48 of the human dystrophin transcript
ugaagaccuugaagagcaguuaaauca

SEQ ID NO: 1517 - RNA, 16 nt, Artificial
  Part of exon 42 of the human dystrophin transcript
cacacuguccgugaag

SEQ ID NO: 1518 - RNA, 16 nt, Artificial
  Part of exon 49 of the human dystrophin transcript
cacucagccagugaag

SEQ ID NO: 1519 - RNA, 30 nt, Artificial
  Part of exon 42 of the human dystrophin transcript
agaaacgaugauggugaugacugaagacau

SEQ ID NO: 1520 - RNA, 33 nt, Artificial
  Part of exon 51 of the human dystrophin transcript
acagagggugauggugggugaccuugaggauau

SEQ ID NO: 1521 - RNA, 47 nt, Artificial
  Part of exon 42 of the human dystrophin transcript
cacacuguccgugaagaaacgaugauggugaugacugaagacaugcc

SEQ ID NO: 1522 - RNA, 50 nt, Artificial
  Part of exon 53 of the human dystrophin transcript
cacaauggcuggaagcuaaggaagaagcugagcaggucuuaggacaggcc

SEQ ID NO: 1523 - RNA, 28 nt, Artificial
  Part of exon 42 of the human dystrophin transcript
agaaguggaacaacuucucaaugcuccu

SEQ ID NO: 1524 - RNA, 27 nt, Artificial
  Part of exon 55 of the human dystrophin transcript
agaagcugaaacaacugccaauguccu

SEQ ID NO: 1525 - RNA, 26 nt, Artificial
  Part of exon 42 of the human dystrophin transcript
gaaauuucuuaugugccuucuacuua

SEQ ID NO: 1526 - RNA, 26 nt, Artificial
  Part of exon 57 of the human dystrophin transcript
ggaacuucugguguggcuacagcuga

SEQ ID NO: 1527 - RNA, 22 nt, Artificial
  Part of exon 42 of the human dystrophin transcript
acuguccgugaagaaacgauga

SEQ ID NO: 1528 - RNA, 22 nt, Artificial
  Part of exon 59 of the human dystrophin transcript
acuggcagagaaaaauagauga

SEQ ID NO: 1529 - RNA, 50 nt, Artificial
  Part of exon 42 of the human dystrophin transcript
agaaguggaacaacuucucaaugcuccugaccucugugcuaaggacuuug

SEQ ID NO: 1530 - RNA, 47 nt, Artificial
  Part of exon 60 of the human dystrophin transcript
agaacgugagccacgucaaugaccuugcucgccagcuuaccacuuug

SEQ ID NO: 1531 - RNA, 25 nt, Artificial
  Part of exon 43 of the human dystrophin transcript
aaugggaaaaaguuaacaaaaugua

SEQ ID NO: 1532 - RNA, 28 nt, Artificial
  Part of exon 44 of the human dystrophin transcript
auugggaacaugcuaaauacaaauggua

SEQ ID NO: 1533 - RNA, 37 nt, Artificial
  Part of exon 43 of the human dystrophin transcript
gaagacagcagcauugcaaagugcaacgccuguggaa

SEQ ID NO: 1534 - RNA, 35 nt, Artificial
  Part of exon 46 of the human dystrophin transcript
gaaaagagcagcaacuaaaagaaaagcuugagcaa

SEQ ID NO: 1535 - RNA, 25 nt, Artificial
  Part of exon 43 of the human dystrophin transcript
aagauagucuacaacaaagcucagg

SEQ ID NO: 1536 - RNA, 26 nt, Artificial
  Part of exon 47 of the human dystrophin transcript
aagauaaacuugaaaauaagcucaag

SEQ ID NO: 1537 - RNA, 60 nt, Artificial
  Part of exon 43 of the human dystrophin transcript
gcucucucccagcuugauuuccaaugggaaaaaguuaacaaaauguacaaggaccgacaa

SEQ ID NO: 1538 - RNA, 58 nt, Artificial
  Part of exon 48 of the human dystrophin transcript
guuaucuccuauuaggaaucaguuggaaauuuauaaccaaccaaaccaagaaggacca

SEQ ID NO: 1539 - RNA, 31 nt, Artificial
  Part of exon 43 of the human dystrophin transcript
aaaguuaacaaaauguacaaggaccgacaag

SEQ ID NO: 1540 - RNA, 31 nt, Artificial
  Part of exon 49 of the human dystrophin transcript
aaagggcagcauuuguacaaggaaaaaccag

SEQ ID NO: 1541 - RNA, 60 nt, Artificial
  Part of exon 43 of the human dystrophin transcript
uugcaaagugcaacgccuguggaaagggugaagcuacaggaagcucucucccagcuugau

SEQ ID NO: 1542 - RNA, 56 nt, Artificial
  Part of exon 51 of the human dystrophin transcript
uggcagauuucaaccgggcuuggacagaacuuaccgacuggcuuucucugcuugau

SEQ ID NO: 1543 - RNA, 44 nt, Artificial
  Part of exon 43 of the human dystrophin transcript
cagcuugauuuccaaugggaaaaaguuaacaaaauguacaagga

SEQ ID NO: 1544 - RNA, 44 nt, Artificial
  Part of exon 53 of the human dystrophin transcript
caccuucagaaccggaggcaacaguugaaugaaauguuaaagga

SEQ ID NO: 1545 - RNA, 21 nt, Artificial
  Part of exon 43 of the human dystrophin transcript
ugcaacgccuguggaaagggu

SEQ ID NO: 1546 - RNA, 21 nt, Artificial
  Part of exon 55 of the human dystrophin transcript
ugcuacccguaaggaaaggcu

SEQ ID NO: 1547 - RNA, 13 nt, Artificial
  Part of exon 43 of the human dystrophin transcript
ggugaagcuacag

SEQ ID NO: 1548 - RNA, 13 nt, Artificial
  Part of exon 57 of the human dystrophin transcript
gguguggcuacag

SEQ ID NO: 1549 - RNA, 17 nt, Artificial
  Part of exon 43 of the human dystrophin transcript
aaugggaaaaaguuaac

SEQ ID NO: 1550 - RNA, 17 nt, Artificial
  Part of exon 59 of the human dystrophin transcript
agugggaaaaauugaac

SEQ ID NO: 1551 - RNA, 29 nt, Artificial
  Part of exon 43 of the human dystrophin transcript
cuguggaaagggugaagcuacaggaagcu

SEQ ID NO: 1552 - RNA, 31 nt, Artificial
  Part of exon 60 of the human dystrophin transcript
cucuggaagaccugaacaccagauggaagcu

SEQ ID NO: 1553 - RNA, 47 nt, Artificial
  Part of exon 44 of the human dystrophin transcript
uuaaucaguggcuaacagaagcugaacaguuucucagaaagacacaa

SEQ ID NO: 1554 - RNA, 49 nt, Artificial
  Part of exon 45 of the human dystrophin transcript
ugaaucugcgguggcaggaggucugcaaacagcugucagacagaaaaaa

SEQ ID NO: 1555 - RNA, 20 nt, Artificial
  Part of exon 44 of the human dystrophin transcript
caguggcuaacagaagcuga

SEQ ID NO: 1556 - RNA, 20 nt, Artificial
  Part of exon 54 of the human dystrophin transcript
caguggcagacaaauguaga

SEQ ID NO: 1557 - RNA, 22 nt, Artificial
  Part of exon 44 of the human dystrophin transcript
agaaagacacaaauuccugaga

SEQ ID NO: 1558 - RNA, 22 nt, Artificial
  Part of exon 56 of the human dystrophin transcript
aaacagccaaaaaauccugaga

SEQ ID NO: 1559 - RNA, 27 nt, Artificial
  Part of exon 45 of the human dystrophin transcript
gcaacuggggaagaaauaauucagcaa

SEQ ID NO: 1560 - RNA, 25 nt, Artificial
  Part of exon 46 of the human dystrophin transcript
gcaacuaaaagaaaagcuugagcaa

SEQ ID NO: 1561 - RNA, 42 nt, Artificial
  Part of exon 45 of the human dystrophin transcript
cagcggcaaacuguugucagaacauugaaugcaacuggggaa

SEQ ID NO: 1562 - RNA, 42 nt, Artificial
  Part of exon 47 of the human dystrophin transcript
cugcgccagggaauucucaaacaauuaaaugaaacuggagga

SEQ ID NO: 1563 - RNA, 14 nt, Artificial
  Part of exon 45 of the human dystrophin transcript
uugggaagccugaa

SEQ ID NO: 1564 - RNA, 14 nt, Artificial
  Part of exon 48 of the human dystrophin transcript
uugggcagcuugaa

SEQ ID NO: 1565 - RNA, 25 nt, Artificial
  Part of exon 45 of the human dystrophin transcript
agaugccaguauucuacaggaaaaa

SEQ ID NO: 1566 - RNA, 27 nt, Artificial
  Part of exon 49 of the human dystrophin transcript
aaagggcagcauuuguacaaggaaaaa

SEQ ID NO: 1567 - RNA, 25 nt, Artificial
  Part of exon 45 of the human dystrophin transcript
cagcaauccucaaaaacagaugcca

SEQ ID NO: 1568 - RNA, 26 nt, Artificial
  Part of exon 51 of the human dystrophin transcript
cugccaucuccaaacuagaaaugcca

SEQ ID NO: 1569 - RNA, 77 nt, Artificial
  Part of exon 45 of the human dystrophin transcript
ucagaacauugaaugcaacuggggaagaaauaauucagcaauccucaaaaacagaugccaguauucuacaggaaaaa

SEQ ID NO: 1570 - RNA, 70 nt, Artificial
  Part of exon 53 of the human dystrophin transcript
ucagaaccggaggcaacaguugaaugaaauguuaaaggauucaacacaauggcuggaagcuaaggaagaa

SEQ ID NO: 1571 - RNA, 25 nt, Artificial
  Part of exon 45 of the human dystrophin transcript
aaacagaugccaguauucuacagga

SEQ ID NO: 1572 - RNA, 25 nt, Artificial
  Part of exon 55 of the human dystrophin transcript
aaacaacugccaauguccuacagga

SEQ ID NO: 1573 - RNA, 38 nt, Artificial
  Part of exon 45 of the human dystrophin transcript
auugggaagccugaaucugcgguggcaggaggucugca

SEQ ID NO: 1574 - RNA, 37 nt, Artificial
  Part of exon 57 of the human dystrophin transcript
auuuggaagccaguucugaccaguggaagcgucugca

SEQ ID NO: 1575 - RNA, 27 nt, Artificial
  Part of exon 45 of the human dystrophin transcript
cugcaaacagcugucagacagaaaaaa

SEQ ID NO: 1576 - RNA, 27 nt, Artificial
  Part of exon 59 of the human dystrophin transcript
cugcacuccgcugacuggcagagaaaa

SEQ ID NO: 1577 - RNA, 29 nt, Artificial
  Part of exon 45 of the human dystrophin transcript
ccucaaaaacagaugccaguauucuacag

SEQ ID NO: 1578 - RNA, 28 nt, Artificial
  Part of exon 60 of the human dystrophin transcript
ccugaacaccagauggaagcuucugcag

SEQ ID NO: 1579 - RNA, 37 nt, Artificial
  Part of exon 46 of the human dystrophin transcript
cacuugaaccuggaaaagagcagcaacuaaaagaaaa

SEQ ID NO: 1580 - RNA, 37 nt, Artificial
  Part of exon 54 of the human dystrophin transcript
cagaugauaccagaaaaguccacaugauaacagagaa

SEQ ID NO: 1581 - RNA, 25 nt, Artificial
  Part of exon 46 of the human dystrophin transcript
aaccuggaaaagagcagcaacuaaa

SEQ ID NO: 1582 - RNA, 25 nt, Artificial
  Part of exon 56 of the human dystrophin transcript
aaccuggaugaaaacagccaaaaaa

SEQ ID NO: 1583 - RNA, 30 nt, Artificial
  Part of exon 47 of the human dystrophin transcript
agaagagcaagauaaacuugaaaauaagcu

SEQ ID NO: 1584 - RNA, 30 nt, Artificial
  Part of exon 48 of the human dystrophin transcript
aaaagaccuugggcagcuugaaaaaaagcu

SEQ ID NO: 1585 - RNA, 40 nt, Artificial
  Part of exon 47 of the human dystrophin transcript
aaacuugaaaauaagcucaagcagacaaaucuccagugga

SEQ ID NO: 1586 - RNA, 40 nt, Homo sapiens
aaacugaaauagcaguucaagcuaaacaaccggaugugga

SEQ ID NO: 1587 - RNA, 29 nt, Homo sapiens
agauaaacuugaaaauaagcucaagcaga

SEQ ID NO: 1588 - RNA, 27 nt, Artificial
  Part of exon 49 of the human dystrophin transcript
auaucaacgagaugaucaucaagcaga

SEQ ID NO: 1589 - RNA, 15 nt, Artificial
  Part of exon 47 of the human dystrophin transcript
aacaauuaaaugaaa

SEQ ID NO: 1590 - RNA, 15 nt, Artificial
  Part of exon 53 of the human dystrophin transcript
aacaguugaaugaaa

SEQ ID NO: 1591 - RNA, 27 nt, Artificial
  Part of exon 47 of the human dystrophin transcript
uggaagaguugccccugcgccagggaa

SEQ ID NO: 1592 - RNA, 27 nt, Artificial
  Part of exon 55 of the human dystrophin transcript
ugcaacaguucccccuggaccuggaaa

SEQ ID NO: 1593 - RNA, 38 nt, Artificial
  Part of exon 47 of the human dystrophin transcript
uuacugguggaagaguugccccugcgccagggaauucu

SEQ ID NO: 1594 - RNA, 42 nt, Artificial
  Part of exon 57 of the human dystrophin transcript
ugaccaguggaagcgucugcaccuuucucugcaggaacuucu

SEQ ID NO: 1595 - RNA, 129 nt, Artificial
  Part of exon 47 of the human dystrophin transcript
uacugguggaagaguugccccugcgccagggaauucucaaacaauuaaaugaaacuggaggacccgugcuuguaagugcucccauaagcccagaagagcaagauaaacuugaaaauaagcucaagcaga

SEQ ID NO: 1596 - RNA, 126 nt, Artificial
  Part of exon 59 of the human dystrophin transcript
uacugagugggaaaaauugaaccugcacuccgcugacuggcagagaaaaauagaugagacccuugaaagacuccaggaacuucaagaggccacggaugagcuggaccucaagcugcgccaagcuga

SEQ ID NO: 1597 - RNA, 49 nt, Artificial
  Part of exon 47 of the human dystrophin transcript
ugguggaagaguugccccugcgccagggaauucucaaacaauuaaauga

SEQ ID NO: 1598 - RNA, 48 nt, Artificial
  Part of exon 60 of the human dystrophin transcript
ucgaggagaaauugcgccucugaaagagaacgugagccacgucaauga

SEQ ID NO: 1599 - RNA, 25 nt, Artificial
  Part of exon 48 of the human dystrophin transcript
gaaauugaagcucaaauaaaagacc

SEQ ID NO: 1600 - RNA, 26 nt, Artificial
  Part of exon 49 of the human dystrophin transcript
gaaauagcaguucaagcuaaacaacc

SEQ ID NO: 1601 - RNA, 29 nt, Artificial
  Part of exon 48 of the human dystrophin transcript
cuugggcagcuugaaaaaaagcuugaaga

SEQ ID NO: 1602 - RNA, 29 nt, Artificial
  Part of exon 51 of the human dystrophin transcript
cucuggcagauuucaaccgggcuuggaca

SEQ ID NO: 1603 - RNA, 65 nt, Artificial
  Part of exon 48 of the human dystrophin transcript
ugagaaacaaggagaaauugaagcucaaauaaaagaccuugggcagcuugaaaaaaagcuugaag

SEQ ID NO: 1604 - RNA, 70 nt, Artificial
  Part of exon 53 of the human dystrophin transcript
ucagaaucagugggaugaaguacaagaacaccuucagaaccggaggcaacaguugaaugaaauguuaaag

SEQ ID NO: 1605 - RNA, 56 nt, Artificial
  Part of exon 48 of the human dystrophin transcript
gcagcuugaaaaaaagcuugaagaccuugaagagcaguuaaaucaucugcugcugu

SEQ ID NO: 1606 - RNA, 54 nt, Artificial
  Part of exon 55 of the human dystrophin transcript
ggaccuggaaaaguuucuugccuggcuuacagaagcugaaacaacugccaaugu

SEQ ID NO: 1607 - RNA, 39 nt, Artificial
  Part of exon 48 of the human dystrophin transcript
uugaagaccuugaagagcaguuaaaucaucugcugcugu

SEQ ID NO: 1608 - RNA, 39 nt, Artificial
  Part of exon 57 of the human dystrophin transcript
uggaagccaguucugaccaguggaagcgucugcaccuuu

SEQ ID NO: 1609 - RNA, 63 nt, Artificial
  Part of exon 48 of the human dystrophin transcript
ggagaaauugaagcucaaauaaaagaccuugggcagcuugaaaaaaagcuugaagaccuugaa

SEQ ID NO: 1610 - RNA, 58 nt, Artificial
  Part of exon 59 of the human dystrophin transcript
ggaaaaauugaaccugcacuccgcugacuggcagagaaaaauagaugagacccuugaa

SEQ ID NO: 1611 - RNA, 45 nt, Artificial
  Part of exon 48 of the human dystrophin transcript
caaggagaaauugaagcucaaauaaaagaccuugggcagcuugaa

SEQ ID NO: 1612 - RNA, 44 nt, Artificial
  Part of exon 60 of the human dystrophin transcript
cgaggagaaauugcgccucugaaagagaacgugagccacgucaa

SEQ ID NO: 1613 - RNA, 21 nt, Artificial
  Part of exon 49 of the human dystrophin transcript
caaccggauguggaagagauu

SEQ ID NO: 1614 - RNA, 22 nt, Artificial
  Part of exon 51 of the human dystrophin transcript
caaccgggcuuggacagaacuu

SEQ ID NO: 1615 - RNA, 32 nt, Artificial
  Part of exon 49 of the human dystrophin transcript
ugaaauagcaguucaagcuaaacaaccggaug

SEQ ID NO: 1616 - RNA, 31 nt, Artificial
  Part of exon 53 of the human dystrophin transcript
ugaaguacaagaacaccuucagaaccggagg

SEQ ID NO: 1617 - RNA, 54 nt, Artificial
  Part of exon 49 of the human dystrophin transcript
gaaacugaaauagcaguucaagcuaaacaaccggauguggaagagauuuugucu

SEQ ID NO: 1618 - RNA, 55 nt, Artificial
  Part of exon 55 of the human dystrophin transcript
gaaacucauagauuacugcaacaguucccccuggaccuggaaaaguuucuugccu

SEQ ID NO: 1619 - RNA, 19 nt, Artificial
  Part of exon 49 of the human dystrophin transcript
agcaguucaagcuaaacaa

SEQ ID NO: 1620 - RNA, 21 nt, Artificial
  Part of exon 57 of the human dystrophin transcript
agcaguucagaagcagaacga

SEQ ID NO: 1621 - RNA, 36 nt, Artificial
  Part of exon 49 of the human dystrophin transcript
ucaagcuaaacaaccggauguggaagagauuuuguc

SEQ ID NO: 1622 - RNA, 39 nt, Artificial
  Part of exon 59 of the human dystrophin transcript
ucaagcugcgccaagcugaggugaucaagggauccuggc

SEQ ID NO: 1623 - RNA, 34 nt, Artificial
  Part of exon 49 of the human dystrophin transcript
gcaguucaagcuaaacaaccggauguggaagaga

SEQ ID NO: 1624 - RNA, 34 nt, Artificial
  Part of exon 60 of the human dystrophin transcript
gcacuucgaggagaaauugcgccucugaaagaga

SEQ ID NO: 1625 - RNA, 69 nt, Artificial
  Part of exon 50 of the human dystrophin transcript
aaguuagaagaucugagcucugaguggaaggcgguaaaccguuuacuucaagagcugagggcaaagcag

SEQ ID NO: 1626 - RNA, 68 nt, Artificial
  Part of exon 51 of the human dystrophin transcript
aaguuauaaaaucacagagggugauggugggugaccuugaggauaucaacgagaugaucaucaagcag

SEQ ID NO: 1627 - RNA, 97 nt, Artificial
  Part of exon 50 of the human dystrophin transcript
uuagaagaucugagcucugaguggaaggcgguaaaccguuuacuucaagagcugagggcaaagcagccugaccuagcuccuggacugaccacuauug

SEQ ID NO: 1628 - RNA, 95 nt, Artificial
  Part of exon 53 of the human dystrophin transcript
uugaaagaauucagaaucagugggaugaaguacaagaacaccuucagaaccggaggcaacaguugaaugaaauguuaaaggauucaacacaaugg

SEQ ID NO: 1629 - RNA, 19 nt, Artificial
  Part of exon 50 of the human dystrophin transcript
aggaaguuagaagaucuga

SEQ ID NO: 1630 - RNA, 18 nt, Artificial
  Part of exon 55 of the human dystrophin transcript
agggaguaaaagagcuga

SEQ ID NO: 1631 - RNA, 48 nt, Artificial
  Part of exon 50 of the human dystrophin transcript
agaucugagcucugaguggaaggcgguaaaccguuuacuucaagagcu

SEQ ID NO: 1632 - RNA, 44 nt, Artificial
  Part of exon 57 of the human dystrophin transcript
aguucugaccaguggaagcgucugcaccuuucucugcaggaacu

SEQ ID NO: 1633 - RNA, 39 nt, Artificial
  Part of exon 50 of the human dystrophin transcript
acuucaagagcugagggcaaagcagccugaccuagcucc

SEQ ID NO: 1634 - RNA, 38 nt, Artificial
  Part of exon 59 of the human dystrophin transcript
acuucaagaggccacggaugagcuggaccucaagcugc

SEQ ID NO: 1635 - RNA, 30 nt, Artificial
  Part of exon 50 of the human dystrophin transcript
ugaccuagcuccuggacugaccacuauugg

SEQ ID NO: 1636 - RNA, 30 nt, Artificial
  Part of exon 60 of the human dystrophin transcript
ugaccuugcucgccagcuuaccacuuuggg

SEQ ID NO: 1637 - RNA, 29 nt, Artificial
  Part of exon 51 of the human dystrophin transcript
auaucaacgagaugaucaucaagcagaag

SEQ ID NO: 1638 - RNA, 29 nt, Artificial
  Part of exon 52 of the human dystrophin transcript
auuugaaaaacaagaccagcaaucaagag

SEQ ID NO: 1639 - RNA, 18 nt, Artificial
  Part of exon 51 of the human dystrophin transcript
acuaaggaaacugccauc

SEQ ID NO: 1640 - RNA, 18 nt, Artificial
  Part of exon 58 of the human dystrophin transcript
acuaaagaaccuguaauc

SEQ ID NO: 1641 - RNA, 82 nt, Artificial
  Part of exon 52 of the human dystrophin transcript
uuggaagaacucauuaccgcugcccaaaauuugaaaaacaagaccagcaaucaagaggcuagaacaaucauuacggaucgaa

SEQ ID NO: 1642 - RNA, 87 nt, Artificial
  Part of exon 53 of the human dystrophin transcript
uugaaagaauucagaaucagugggaugaaguacaagaacaccuucagaaccggaggcaacaguugaaugaaauguuaaaggauucaa

SEQ ID NO: 1643 - RNA, 14 nt, Artificial
  Part of exon 52 of the human dystrophin transcript
uuggaagaacucau

SEQ ID NO: 1644 - RNA, 15 nt, Artificial
  Part of exon 55 of the human dystrophin transcript
uuggaagaaacucau

SEQ ID NO: 1645 - RNA, 25 nt, Artificial
  Part of exon 52 of the human dystrophin transcript
ccagcaaucaagaggcuagaacaau

SEQ ID NO: 1646 - RNA, 24 nt, Artificial
  Part of exon 57 of the human dystrophin transcript
ccagcaguucagaagcagaacgau

SEQ ID NO: 1647 - RNA, 31 nt, Artificial
  Part of exon 52 of the human dystrophin transcript
uugaaaaacaagaccagcaaucaagaggcua

SEQ ID NO: 1648 - RNA, 30 nt, Artificial
  Part of exon 59 of the human dystrophin transcript
uugaaagacuccaggaacuucaagaggcca

SEQ ID NO: 1649 - RNA, 17 nt, Artificial
  Part of exon 52 of the human dystrophin transcript
uggaagaacucauuacc

SEQ ID NO: 1650 - RNA, 17 nt, Artificial
  Part of exon 60 of the human dystrophin transcript
uggaagaccugaacacc

SEQ ID NO: 1651 - RNA, 27 nt, Artificial
  Part of exon 53 of the human dystrophin transcript
cugagcaggucuuaggacaggccagag

SEQ ID NO: 1652 - RNA, 26 nt, Artificial
  Part of exon 58 of the human dystrophin transcript
cagagcagccuuuggaaggacuagag

SEQ ID NO: 1653 - RNA, 43 nt, Artificial
  Part of exon 54 of the human dystrophin transcript
cugaaacuucuccgggauuauucugcagaugauaccagaaaag

SEQ ID NO: 1654 - RNA, 42 nt, Artificial
  Part of exon 55 of the human dystrophin transcript
cugaaacaacugccaauguccuacaggaugcuacccguaagg

SEQ ID NO: 1655 - RNA, 21 nt, Artificial
  Part of exon 54 of the human dystrophin transcript
caguggcagacaaauguagau

SEQ ID NO: 1656 - RNA, 21 nt, Artificial
  Part of exon 57 of the human dystrophin transcript
cagaagcagaacgauguacau

SEQ ID NO: 1657 - RNA, 55 nt, Artificial
  Part of exon 54 of the human dystrophin transcript
cuccgccaguggcagacaaauguagauguggcaaaugacuuggcccugaaacuuc

SEQ ID NO: 1658 - RNA, 56 nt, Artificial
  Part of exon 59 of the human dystrophin transcript
cuccgcugacuggcagagaaaaauagaugagacccuugaaagacuccaggaacuuc

SEQ ID NO: 1659 - RNA, 53 nt, Artificial
  Part of exon 54 of the human dystrophin transcript
uccgccaguggcagacaaauguagauguggcaaaugacuuggcccugaaacuu

SEQ ID NO: 1660 - RNA, 52 nt, Artificial
  Part of exon 60 of the human dystrophin transcript
ugcgccucugaaagagaacgugagccacgucaaugaccuugcucgccagcuu

SEQ ID NO: 1661 - RNA, 70 nt, Artificial
  Part of exon 55 of the human dystrophin transcript
gaagcugaaacaacugccaauguccuacaggaugcuacccguaaggaaaggcuccuagaagacuccaagg

SEQ ID NO: 1662 - RNA, 76 nt, Artificial
  Part of exon 56 of the human dystrophin transcript
gaagcucacacagauguuuaucacaaccuggaugaaaacagccaaaaaauccugagaucccuggaagguuccgaug

SEQ ID NO: 1663 - RNA, 38 nt, Artificial
  Part of exon 56 of the human dystrophin transcript
acagccaaaaaauccugagaucccuggaagguuccgau

SEQ ID NO: 1664 - RNA, 39 nt, Artificial
  Part of exon 57 of the human dystrophin transcript
acagcugaaagaugaugaauuaagccggcaggcaccuau

SEQ ID NO: 1665 - RNA, 86 nt, Artificial
  Part of exon 56 of the human dystrophin transcript
ggugaaauugaagcucacacagauguuuaucacaaccuggaugaaaacagccaaaaaauccugagaucccuggaagguuccgauga

SEQ ID NO: 1666 - RNA, 90 nt, Artificial
  Part of exon 59 of the human dystrophin transcript
ggaaaaauugaaccugcacuccgcugacuggcagagaaaaauagaugagacccuugaaagacuccaggaacuucaagaggccacggauga

SEQ ID NO: 1667 - RNA, 40 nt, Artificial
  Part of exon 58 of the human dystrophin transcript
acagagcagccuuuggaaggacuagagaaacucuaccagg

SEQ ID NO: 1668 - RNA, 40 nt, Artificial
  Part of exon 59 of the human dystrophin transcript
auagaugagacccuugaaagacuccaggaacuucaagagg

SEQ ID NO: 1669 - RNA, 16 nt, Artificial
  Part of exon 58 of the human dystrophin transcript
cuucaagagggaauug

SEQ ID NO: 1670 - RNA, 16 nt, Artificial
  Part of exon 60 of the human dystrophin transcript
cuucgaggagaaauug

SEQ ID NO: 1671 - RNA, 24 nt, Artificial
  Oligonucleotide
gugauguacauuaagauggacuuc

SEQ ID NO: 1672 - RNA, 24 nt, Artificial
  Oligonucleotide
  misc_feature (2)..(2): n is U or 5-methyluracil
  misc_feature (4)..(4): n is A or 2,6-diaminopurine
  misc_feature (5)..(5): n is U or 5-methyluracil
  misc_feature (7)..(7): n is U or 5-methyluracil
  misc_feature (8)..(8): n is A or 2,6-diaminopurine
  misc_feature (9)..(9): n is C or 5-methylcytosine
  misc_feature (10)..(10): n is A or 2,6-diaminopurine
  misc_feature (11)..(11): n is U or 5-methyluracil
  misc_feature (12)..(12): n is U or 5-methyluracil
  misc_feature (13)..(13): n is A or 2,6-diaminopurine
  misc_feature (14)..(14): n is A or 2,6-diaminopurine
  misc_feature (16)..(16): n is A or 2,6-diaminopurine
  misc_feature (17)..(17): n is U or 5-methyluracil
  misc_feature (20)..(20): n is A or 2,6-diaminopurine
  misc_feature (21)..(21): n is C or 5-methylcytosine
  misc_feature (22)..(22): n is U or 5-methyluracil
  misc_feature (23)..(23): n is U or 5-methyluracil
  misc_feature (24)..(24): n is C or 5-methylcytosine
gngnngnnnnnnnngnnggnnnnn

SEQ ID NO: 1673 - RNA, 25 nt, Artificial
  Oligonucleotide
cuuccuuccgaaagauugcaaauuc

SEQ ID NO: 1674 - RNA, 25 nt, Artificial
  Oligonucleotide
  misc_feature (1)..(1): n is C or 5-methylcytosine
  misc_feature (2)..(2): n is U or 5-methyluracil
  misc_feature (3)..(3): n is U or 5-methyluracil
  misc_feature (4)..(4): n is C or 5-methylcytosine
  misc_feature (5)..(5): n is C or 5-methylcytosine
  misc_feature (6)..(6): n is U or 5-methyluracil
  misc_feature (7)..(7): n is U or 5-methyluracil
  misc_feature (8)..(8): n is C or 5-methylcytosine
  misc_feature (9)..(9): n is C or 5-methylcytosine
  misc_feature (11)..(11): n is A or 2,6-diaminopurine
  misc_feature (12)..(12): n is A or 2,6-diaminopurine
  misc_feature (13)..(13): n is A or 2,6-diaminopurine
  misc_feature (15)..(15): n is A or 2,6-diaminopurine
  misc_feature (16)..(16): n is U or 5-methyluracil
  misc_feature (17)..(17): n is U or 5-methyluracil
  misc_feature (19)..(19): n is C or 5-methylcytosine
  misc_feature (20)..(20): n is A or 2,6-diaminopurine
  misc_feature (21)..(21): n is A or 2,6-diaminopurine
  misc_feature (22)..(22): n is A or 2,6-diaminopurine
  misc_feature (23)..(23): n is U or 5-methyluracil
  misc_feature (24)..(24): n is U or 5-methyluracil
  misc_feature (25)..(25): n is C or 5-methylcytosine
nnnnnnnnngnnngnnngnnnnnnn

SEQ ID NO: 1675 - RNA, 21 nt, Artificial
  Oligonucleotide
gacuugucuucaggagcuucc

SEQ ID NO: 1676 - RNA, 21 nt, Artificial
  Oligonucleotide
  misc_feature (2)..(2): n is A or 2,6-diaminopurine
  misc_feature (3)..(3): n is C or 5-methylcytosine
  misc_feature (4)..(4): n is U or 5-methyluracil
  misc_feature (5)..(5): n is U or 5-methyluracil
  misc_feature (7)..(7): n is U or 5-methyluracil
  misc_feature (8)..(8): n is C or 5-methylcytosine
  misc_feature (9)..(9): n is U or 5-methyluracil
  misc_feature (10)..(10): n is U or 5-methyluracil
  misc_feature (11)..(11): n is C or 5-methylcytosine
  misc_feature (12)..(12): n is A or 2,6-diaminopurine
  misc_feature (15)..(15): n is A or 2,6-diaminopurine
  misc_feature (17)..(17): n is C or 5-methylcytosine
  misc_feature (18)..(18): n is U or 5-methyluracil
  misc_feature (19)..(19): n is U or 5-methyluracil
  misc_feature (20)..(20): n is C or 5-methylcytosine
  misc_feature (21)..(21): n is C or 5-methylcytosine
gnnnngnnnnnnggngnnnnn

SEQ ID NO: 1677 - RNA, 25 nt, Artificial
  Oligonucleotide
caaaugacuugucuucaggagcuuc

SEQ ID NO: 1678 - RNA, 25 nt, Artificial
  Oligonucleotide
  misc_feature (1)..(1): n is C or 5-methylcytosine
  misc_feature (2)..(2): n is A or 2,6-diaminopurine
  misc_feature (3)..(3): n is A or 2,6-diaminopurine
  misc_feature (4)..(4): n is A or 2,6-diaminopurine
  misc_feature (5)..(5): n is U or 5-methyluracil
  misc_feature (7)..(7): n is A or 2,6-diaminopurine
  misc_feature (8)..(8): n is C or 5-methylcytosine
  misc_feature (9)..(9): n is U or 5-methyluracil
  misc_feature (10)..(10): n is U or 5-methyluracil
  misc_feature (12)..(12): n is U or 5-methyluracil
  misc_feature (13)..(13): n is C or 5-methylcytosine
  misc_feature (14)..(14): n is U or 5-methyluracil
  misc_feature (15)..(15): n is U or 5-methyluracil
  misc_feature (16)..(16): n is C or 5-methylcytosine
  misc_feature (17)..(17): n is A or 2,6-diaminopurine
  misc_feature (20)..(20): n is A or 2,6-diaminopurine
  misc_feature (22)..(22): n is C or 5-methylcytosine
  misc_feature (23)..(23): n is U or 5-methyluracil
  misc_feature (24)..(24): n is U or 5-methyluracil
  misc_feature (25)..(25): n is C or 5-methylcytosine
nnnnngnnnngnnnnnnggngnnnn

SEQ ID NO: 1679 - RNA, 25 nt, Artificial
  Oligonucleotide
cugccaaaugacuugucuucaggag

SEQ ID NO: 1680 - RNA, 25 nt, Artificial
  Oligonucleotide
  misc_feature (1)..(1): n is C or 5-methylcytosine
  misc_feature (2)..(2): n is U or 5-methyluracil
  misc_feature (4)..(4): n is C or 5-methylcytosine
  misc_feature (5)..(5): n is C or 5-methylcytosine
  misc_feature (6)..(6): n is A or 2,6-diaminopurine
  misc_feature (7)..(7): n is A or 2,6-diaminopurine
  misc_feature (8)..(8): n is A or 2,6-diaminopurine
  misc_feature (9)..(9): n is U or 5-methyluracil
  misc_feature (11)..(11): n is A or 2,6-diaminopurine
  misc_feature (12)..(12): n is C or 5-methylcytosine
  misc_feature (13)..(13): n is U or 5-methyluracil
  misc_feature (14)..(14): n is U or 5-methyluracil
  misc_feature (16)..(16): n is U or 5-methyluracil
  misc_feature (17)..(17): n is C or 5-methylcytosine
  misc_feature (18)..(18): n is U or 5-methyluracil
  misc_feature (19)..(19): n is U or 5-methyluracil
  misc_feature (20)..(20): n is C or 5-methylcytosine
  misc_feature (21)..(21): n is A or 2,6-diaminopurine
  misc_feature (24)..(24): n is A or 2,6-diaminopurine
nngnnnnnngnnnngnnnnnnggng

SEQ ID NO: 1681 - RNA, 25 nt, Artificial
  Oligonucleotide
  misc_feature (6)..(6): n is 2,6-diaminopurine
  misc_feature (7)..(7): n is 2,6-diaminopurine
  misc_feature (8)..(8): n is 2,6-diaminopurine
  misc_feature (11)..(11): n is 2,6-diaminopurine
  misc_feature (21)..(21): n is 2,6-diaminopurine
  misc_feature (24)..(24): n is 2,6-diaminopurine
cugccnnnugncuugucuucnggng

SEQ ID NO: 1682 - RNA, 15 nt, Artificial
  Oligonucleotide
ccaaaugacuugucu

SEQ ID NO: 1683 - RNA, 15 nt, Artificial
  Oligonucleotide
  misc_feature (6)..(6): n is U or 5-methyluracil
  misc_feature (10)..(10): n is U or 5-methyluracil
  misc_feature (11)..(11): n is U or 5-methyluracil
  misc_feature (13)..(13): n is U or 5-methyluracil
  misc_feature (15)..(15): n is U or 5-methyluracil
ccaaangacnngncn

SEQ ID NO: 1684 - RNA, 21 nt, Artificial
  Oligonucleotide
caaaugacuugucuucaggag

SEQ ID NO: 1685 - RNA, 21 nt, Artificial
  Oligonucleotide
  misc_feature (1)..(1): n is 5-methylcytosine
  misc_feature (8)..(8): n is 5-methylcytosine
  misc_feature (13)..(13): n is 5-methylcytosine
  misc_feature (16)..(16): n is 5-methylcytosine
naaauganuugunuunaggag

SEQ ID NO: 1686 - RNA, 21 nt, Artificial
  Oligonucleotide
  misc_feature (2)..(2): n is 2,6-diaminopurine
  misc_feature (3)..(3): n is 2,6-diaminopurine
  misc_feature (4)..(4): n is 2,6-diaminopurine
  misc_feature (7)..(7): n is 2,6-diaminopurine
  misc_feature (17)..(17): n is 2,6-diaminopurine
  misc_feature (20)..(20): n is 2,6-diaminopurine
cnnnugncuugucuucnggng

SEQ ID NO: 1687 - RNA, 21 nt, Artificial
  Oligonucleotide
  misc_feature (1)..(1): n is A or 2,6-diaminopurine
  misc_feature (2)..(2): n is U or 5-methyluracil
  misc_feature (4)..(4): n is A or 2,6-diaminopurine
  misc_feature (5)..(5): n is C or 5-methylcytosine
  misc_feature (6)..(6): n is U or 5-methyluracil
  misc_feature (7)..(7): n is U or 5-methyluracil
  misc_feature (9)..(9): n is U or 5-methyluracil
  misc_feature (10)..(10): n is C or 5-methylcytosine
  misc_feature (11)..(11): n is U or 5-methyluracil
  misc_feature (12)..(12): n is U or 5-methyluracil
  misc_feature (13)..(13): n is C or 5-methylcytosine
  misc_feature (14)..(14): n is A or 2,6-diaminopurine
  misc_feature (17)..(17): n is A or 2,6-diaminopurine
  misc_feature (20)..(20): n is A or 2,6-diaminopurine
nngnnnngnnnnnnggnggng

SEQ ID NO: 1688 - RNA, 26 nt, Artificial
  Oligonucleotide
cagucuccugggcagacuggaugcuc

SEQ ID NO: 1689 - RNA, 26 nt, Artificial
  Oligonucleotide
  misc_feature (1)..(1): n is C or 5-methylcytosine
  misc_feature (2)..(2): n is A or 2,6-diaminopurine
  misc_feature (4)..(4): n is U or 5-methyluracil
  misc_feature (5)..(5): n is C or 5-methylcytosine
  misc_feature (6)..(6): n is U or 5-methyluracil
  misc_feature (7)..(7): n is C or 5-methylcytosine
  misc_feature (8)..(8): n is C or 5-methylcytosine
  misc_feature (9)..(9): n is U or 5-methyluracil
  misc_feature (13)..(13): n is C or 5-methylcytosine
  misc_feature (14)..(14): n is A or 2,6-diaminopurine
  misc_feature (16)..(16): n is A or 2,6-diaminopurine
  misc_feature (17)..(17): n is C or 5-methylcytosine
  misc_feature (18)..(18): n is U or 5-methyluracil
  misc_feature (21)..(21): n is A or 2,6-diaminopurine
  misc_feature (22)..(22): n is U or 5-methyluracil
  misc_feature (24)..(24): n is C or 5-methylcytosine
  misc_feature (25)..(25): n is U or 5-methyluracil
  misc_feature (26)..(26): n is C or 5-methylcytosine
nngnnnnnngggnngnnnggnngnnn

SEQ ID NO: 1690 - RNA, 22 nt, Artificial
  Oligonucleotide
  misc_feature (1)..(1): n is A or 2,6-diaminopurine
  misc_feature (2)..(2): n is U or 5-methyluracil
  misc_feature (4)..(4): n is A or 2,6-diaminopurine
  misc_feature (5)..(5): n is A or 2,6-diaminopurine
  misc_feature (6)..(6): n is C or 5-methylcytosine
  misc_feature (7)..(7): n is U or 5-methyluracil
  misc_feature (9)..(9): n is C or 5-methylcytosine
  misc_feature (10)..(10): n is C or 5-methylcytosine
  misc_feature (11)..(11): n is A or 2,6-diaminopurine
  misc_feature (12)..(12): n is A or 2,6-diaminopurine
  misc_feature (13)..(13): n is A or 2,6-diaminopurine
  misc_feature (14)..(14): n is U or 5-methyluracil
  misc_feature (16)..(16): n is A or 2,6-diaminopurine
  misc_feature (17)..(17): n is C or 5-methylcytosine
  misc_feature (18)..(18): n is U or 5-methyluracil
  misc_feature (19)..(19): n is U or 5-methyluracil
  misc_feature (21)..(21): n is U or 5-methyluracil
  misc_feature (22)..(22): n is C or 5-methylcytosine
nngnnnngnnnnnngnnnngnn

SEQ ID NO: 1691 - RNA, 21 nt, Artificial
  Oligonucleotide
  misc_feature (1)..(1): n is A or 2,6-diaminopurine
  misc_feature (2)..(2): n is U or 5-methyluracil
  misc_feature (3)..(3): n is A or 2,6-diaminopurine
  misc_feature (4)..(4): n is A or 2,6-diaminopurine
  misc_feature (6)..(6): n is C or 5-methylcytosine
  misc_feature (7)..(7): n is U or 5-methyluracil
  misc_feature (9)..(9): n is C or 5-methylcytosine
  misc_feature (10)..(10): n is C or 5-methylcytosine
  misc_feature (11)..(11): n is A or 2,6-diaminopurine
  misc_feature (12)..(12): n is A or 2,6-diaminopurine
  misc_feature (13)..(13): n is C or 5-methylcytosine
  misc_feature (14)..(14): n is U or 5-methyluracil
  misc_feature (16)..(16): n is C or 5-methylcytosine
  misc_feature (17)..(17): n is U or 5-methyluracil
  misc_feature (18)..(18): n is U or 5-methyluracil
  misc_feature (20)..(20): n is U or 5-methyluracil
  misc_feature (21)..(21): n is C or 5-methylcytosine
nnnngnngnnnnnngnnngnn

SEQ ID NO: 1692 - RNA, 18 nt, Artificial
  Oligonucleotide
  misc_feature (2)..(2): n is U or 5-methyluracil
  misc_feature (3)..(3): n is C or 5-methylcytosine
  misc_feature (4)..(4): n is C or 5-methylcytosine
  misc_feature (5)..(5): n is A or 2,6-diaminopurine
  misc_feature (8)..(8): n is U or 5-methyluracil
  misc_feature (9)..(9): n is U or 5-methyluracil
  misc_feature (10)..(10): n is U or 5-methyluracil
  misc_feature (11)..(11): n is A or 2,6-diaminopurine
  misc_feature (12)..(12): n is C or 5-methylcytosine
  misc_feature (13)..(13): n is U or 5-methyluracil
  misc_feature (14)..(14): n is U or 5-methyluracil
  misc_feature (15)..(15): n is C or 5-methylcytosine
  misc_feature (16)..(16): n is A or 2,6-diaminopurine
  misc_feature (17)..(17): n is C or 5-methylcytosine
  misc_feature (18)..(18): n is U or 5-methyluracil
gnnnnggnnnnnnnnnnn

SEQ ID NO: 1693 - RNA, 18 nt, Artificial
  Oligonucleotide
  misc_feature (2)..(2): n is U or 5-methyluracil
  misc_feature (3)..(3): n is C or 5-methylcytosine
  misc_feature (4)..(4): n is C or 5-methylcytosine
  misc_feature (5)..(5): n is A or 2,6-diaminopurine
  misc_feature (6)..(6): n is C or 5-methylcytosine
  misc_feature (7)..(7): n is C or 5-methylcytosine
  misc_feature (8)..(8): n is U or 5-methyluracil
  misc_feature (9)..(9): n is U or 5-methyluracil
  misc_feature (11)..(11): n is U or 5-methyluracil
  misc_feature (12)..(12): n is C or 5-methylcytosine
  misc_feature (13)..(13): n is U or 5-methyluracil
  misc_feature (15)..(15): n is C or 5-methylcytosine
  misc_feature (16)..(16): n is A or 2,6-diaminopurine
  misc_feature (17)..(17): n is A or 2,6-diaminopurine
  misc_feature (18)..(18): n is U or 5-methyluracil
gnnnnnnnngnnngnnnn

SEQ ID NO: 1694 - RNA, 17 nt, Artificial
  Oligonucleotide
  misc_feature (1)..(1): n is C or 5-methylcytosine
  misc_feature (2)..(2): n is U or 5-methyluracil
  misc_feature (3)..(3): n is U or 5-methyluracil
  misc_feature (4)..(4): n is C or 5-methylcytosine
  misc_feature (5)..(5): n is U or 5-methyluracil
  misc_feature (6)..(6): n is A or 2,6-diaminopurine
  misc_feature (7)..(7): n is A or 2,6-diaminopurine
  misc_feature (8)..(8): n is A or 2,6-diaminopurine
  misc_feature (10)..(10): n is C or 5-methylcytosine
  misc_feature (11)..(11): n is U or 5-methyluracil
  misc_feature (13)..(13): n is U or 5-methyluracil
  misc_feature (14)..(14): n is U or 5-methyluracil
  misc_feature (15)..(15): n is U or 5-methyluracil
  misc_feature (17)..(17): n is A or 2,6-diaminopurine
nnnnnnnngnngnnngn

SEQ ID NO: 1695 - RNA, 17 nt, Artificial
  Oligonucleotide
  misc_feature (1)..(1): n is C or 5-methylcytosine
  misc_feature (2)..(2): n is U or 5-methyluracil
  misc_feature (3)..(3): n is U or 5-methyluracil
  misc_feature (4)..(4): n is C or 5-methylcytosine
  misc_feature (5)..(5): n is C or 5-methylcytosine
  misc_feature (6)..(6): n is U or 5-methyluracil
  misc_feature (8)..(8): n is A or 2,6-diaminopurine
  misc_feature (11)..(11): n is C or 5-methylcytosine
  misc_feature (12)..(12): n is A or 2,6-diaminopurine
  misc_feature (13)..(13): n is U or 5-methyluracil
  misc_feature (14)..(14): n is U or 5-methyluracil
  misc_feature (15)..(15): n is U or 5-methyluracil
  misc_feature (17)..(17): n is A or 2,6-diaminopurine
nnnnnngnggnnnnngn

SEQ ID NO: 1696 - RNA, 26 nt, Artificial
  Oligonucleotide
  misc_feature (1)..(1): n is U or 5-methyluracil
  misc_feature (2)..(2): n is U or 5-methyluracil
  misc_feature (3)..(3): n is U or 5-methyluracil
  misc_feature (5)..(5): n is A or 2,6-diaminopurine
  misc_feature (6)..(6): n is U or 5-methyluracil
  misc_feature (7)..(7): n is A or 2,6-diaminopurine
  misc_feature (8)..(8): n is A or 2,6-diaminopurine
  misc_feature (9)..(9): n is C or 5-methylcytosine
  misc_feature (12)..(12): n is U or 5-methyluracil
  misc_feature (13)..(13): n is C or 5-methylcytosine
  misc_feature (14)..(14): n is C or 5-methylcytosine
  misc_feature (15)..(15): n is A or 2,6-diaminopurine
  misc_feature (18)..(18): n is U or 5-methyluracil
  misc_feature (19)..(19): n is U or 5-methyluracil
  misc_feature (20)..(20): n is U or 5-methyluracil
  misc_feature (21)..(21): n is A or 2,6-diaminopurine
  misc_feature (22)..(22): n is C or 5-methylcytosine
  misc_feature (23)..(23): n is U or 5-methyluracil
  misc_feature (24)..(24): n is U or 5-methyluracil
  misc_feature (25)..(25): n is C or 5-methylcytosine
  misc_feature (26)..(26): n is A or 2,6-diaminopurine
nnngnnnnnggnnnnggnnnnnnnnn

SEQ ID NO: 1697 - RNA, 20 nt, Artificial
  Oligonucleotide
  misc_feature (1)..(1): n is A or 2,6-diaminopurine
  misc_feature (4)..(4): n is C or 5-methylcytosine
  misc_feature (5)..(5): n is A or 2,6-diaminopurine
  misc_feature (6)..(6): n is U or 5-methyluracil
  misc_feature (7)..(7): n is U or 5-methyluracil
  misc_feature (8)..(8): n is U or 5-methyluracil
  misc_feature (10)..(10): n is A or 2,6-diaminopurine
  misc_feature (12)..(12): n is C or 5-methylcytosine
  misc_feature (13)..(13): n is U or 5-methyluracil
  misc_feature (15)..(15): n is C or 5-methylcytosine
  misc_feature (17)..(17): n is U or 5-methyluracil
  misc_feature (18)..(18): n is C or 5-methylcytosine
  misc_feature (19)..(19): n is C or 5-methylcytosine
  misc_feature (20)..(20): n is A or 2,6-diaminopurine
nggnnnnngngnngngnnnn

SEQ ID NO: 1698 - RNA, 22 nt, Artificial
  Oligonucleotide
  misc_feature (1)..(1): n is U or 5-methyluracil
  misc_feature (2)..(2): n is C or 5-methylcytosine
  misc_feature (3)..(3): n is U or 5-methyluracil
  misc_feature (4)..(4): n is U or 5-methyluracil
  misc_feature (5)..(5): n is C or 5-methylcytosine
  misc_feature (7)..(7): n is A or 2,6-diaminopurine
  misc_feature (8)..(8): n is C or 5-methylcytosine
  misc_feature (9)..(9): n is A or 2,6-diaminopurine
  misc_feature (10)..(10): n is U or 5-methyluracil
  misc_feature (11)..(11): n is C or 5-methylcytosine
  misc_feature (12)..(12): n is U or 5-methyluracil
  misc_feature (13)..(13): n is C or 5-methylcytosine
  misc_feature (14)..(14): n is U or 5-methyluracil
  misc_feature (15)..(15): n is U or 5-methyluracil
  misc_feature (16)..(16): n is U or 5-methyluracil
  misc_feature (17)..(17): n is C or 5-methylcytosine
  misc_feature (18)..(18): n is A or 2,6-diaminopurine
  misc_feature (19)..(19): n is C or 5-methylcytosine
  misc_feature (20)..(20): n is A or 2,6-diaminopurine
  misc_feature (22)..(22): n is U or 5-methyluracil
nnnnngnnnnnnnnnnnnnngn

SEQ ID NO: 1699 - RNA, 19 nt, Artificial
  Oligonucleotide
  misc_feature (2)..(2): n is C or 5-methylcytosine
  misc_feature (4)..(4): n is C or 5-methylcytosine
  misc_feature (5)..(5): n is U or 5-methyluracil
  misc_feature (6)..(6): n is U or 5-methyluracil
  misc_feature (7)..(7): n is U or 5-methyluracil
  misc_feature (8)..(8): n is C or 5-methylcytosine
  misc_feature (9)..(9): n is U or 5-methyluracil
  misc_feature (10)..(10): n is U or 5-methyluracil
  misc_feature (11)..(11): n is C or 5-methylcytosine
  misc_feature (13)..(13): n is A or 2,6-diaminopurine
  misc_feature (14)..(14): n is C or 5-methylcytosine
  misc_feature (15)..(15): n is A or 2,6-diaminopurine
  misc_feature (16)..(16): n is U or 5-methyluracil
  misc_feature (17)..(17): n is C or 5-methylcytosine
  misc_feature (18)..(18): n is U or 5-methyluracil
  misc_feature (19)..(19): n is C or 5-methylcytosine
gngnnnnnnnngnnnnnnn

SEQ ID NO: 1700 - RNA, 22 nt, Artificial
  Oligonucleotide
  misc_feature (1)..(1): n is A or 2,6-diaminopurine
  misc_feature (2)..(2): n is A or 2,6-diaminopurine
  misc_feature (3)..(3): n is U or 5-methyluracil
  misc_feature (4)..(4): n is U or 5-methyluracil
  misc_feature (5)..(5): n is U or 5-methyluracil
  misc_feature (6)..(6): n is C or 5-methylcytosine
  misc_feature (7)..(7): n is A or 2,6-diaminopurine
  misc_feature (9)..(9): n is A or 2,6-diaminopurine
  misc_feature (13)..(13): n is C or 5-methylcytosine
  misc_feature (15)..(15): n is C or 5-methylcytosine
  misc_feature (16)..(16): n is U or 5-methyluracil
  misc_feature (17)..(17): n is U or 5-methyluracil
  misc_feature (18)..(18): n is U or 5-methyluracil
  misc_feature (19)..(19): n is C or 5-methylcytosine
  misc_feature (20)..(20): n is U or 5-methyluracil
  misc_feature (21)..(21): n is U or 5-methyluracil
  misc_feature (22)..(22): n is C or 5-methylcytosine
nnnnnnngngggngnnnnnnnn

SEQ ID NO: 1701 - RNA, 23 nt, Artificial
  Oligonucleotide
  misc_feature (1)..(1): n is U or 5-methyluracil
  misc_feature (2)..(2): n is C or 5-methylcytosine
  misc_feature (3)..(3): n is U or 5-methyluracil
  misc_feature (4)..(4): n is U or 5-methyluracil
  misc_feature (5)..(5): n is C or 5-methylcytosine
  misc_feature (6)..(6): n is A or 2,6-diaminopurine
  misc_feature (8)..(8): n is U or 5-methyluracil
  misc_feature (9)..(9): n is C or 5-methylcytosine
  misc_feature (10)..(10): n is A or 2,6-diaminopurine
  misc_feature (11)..(11): n is U or 5-methyluracil
  misc_feature (12)..(12): n is C or 5-methylcytosine
  misc_feature (13)..(13): n is A or 2,6-diaminopurine
  misc_feature (14)..(14): n is C or 5-methylcytosine
  misc_feature (15)..(15): n is C or 5-methylcytosine
  misc_feature (16)..(16): n is A or 2,6-diaminopurine
  misc_feature (17)..(17): n is U or 5-methyluracil
  misc_feature (18)..(18): n is C or 5-methylcytosine
  misc_feature (19)..(19): n is A or 2,6-diaminopurine
  misc_feature (20)..(20): n is U or 5-methyluracil
  misc_feature (21)..(21): n is C or 5-methylcytosine
  misc_feature (23)..(23): n is U or 5-methyluracil
nnnnnngnnnnnnnnnnnnnngn

SEQ ID NO: 1702 - RNA, 20 nt, Artificial
  Oligonucleotide
  misc_feature (3)..(3): n is C or 5-methylcytosine
  misc_feature (4)..(4): n is A or 2,6-diaminopurine
  misc_feature (5)..(5): n is U or 5-methyluracil
  misc_feature (7)..(7): n is U or 5-methyluracil
  misc_feature (8)..(8): n is C or 5-methylcytosine
  misc_feature (9)..(9): n is U or 5-methyluracil
  misc_feature (10)..(10): n is U or 5-methyluracil
  misc_feature (11)..(11): n is C or 5-methylcytosine
  misc_feature (12)..(12): n is A or 2,6-diaminopurine
  misc_feature (14)..(14): n is U or 5-methyluracil
  misc_feature (15)..(15): n is C or 5-methylcytosine
  misc_feature (16)..(16): n is A or 2,6-diaminopurine
  misc_feature (17)..(17): n is U or 5-methyluracil
  misc_feature (18)..(18): n is C or 5-methylcytosine
  misc_feature (19)..(19): n is A or 2,6-diaminopurine
  misc_feature (20)..(20): n is C or 5-methylcytosine
ggnnngnnnnnngnnnnnnn

SEQ ID NO: 1703 - RNA, 21 nt, Artificial
  Oligonucleotide
  misc_feature (1)..(1): n is A or 2,6-diaminopurine
  misc_feature (2)..(2): n is A or 2,6-diaminopurine
  misc_feature (3)..(3): n is U or 5-methyluracil
  misc_feature (4)..(4): n is U or 5-methyluracil
  misc_feature (5)..(5): n is U or 5-methyluracil
  misc_feature (6)..(6): n is C or 5-methylcytosine
  misc_feature (7)..(7): n is C or 5-methylcytosine
  misc_feature (8)..(8): n is A or 2,6-diaminopurine
  misc_feature (9)..(9): n is A or 2,6-diaminopurine
  misc_feature (10)..(10): n is A or 2,6-diaminopurine
  misc_feature (13)..(13): n is C or 5-methylcytosine
  misc_feature (14)..(14): n is A or 2,6-diaminopurine
  misc_feature (15)..(15): n is U or 5-methyluracil
  misc_feature (17)..(17): n is U or 5-methyluracil
  misc_feature (18)..(18): n is C or 5-methylcytosine
  misc_feature (19)..(19): n is U or 5-methyluracil
  misc_feature (20)..(20): n is U or 5-methyluracil
  misc_feature (21)..(21): n is C or 5-methylcytosine
nnnnnnnnnnggnnngnnnnn

SEQ ID NO: 1704 - RNA, 25 nt, Artificial
  Oligonucleotide
uccuguagaauacuggcaucuguuu

SEQ ID NO: 1705 - RNA, 25 nt, Artificial
  Oligonucleotide
  misc_feature (1)..(1): n is U or 5-methyluracil
  misc_feature (2)..(2): n is C or 5-methylcytosine
  misc_feature (3)..(3): n is C or 5-methylcytosine
  misc_feature (4)..(4): n is U or 5-methyluracil
  misc_feature (6)..(6): n is U or 5-methyluracil
  misc_feature (7)..(7): n is A or 2,6-diaminopurine
  misc_feature (9)..(9): n is A or 2,6-diaminopurine
  misc_feature (10)..(10): n is A or 2,6-diaminopurine
  misc_feature (11)..(11): n is U or 5-methyluracil
  misc_feature (12)..(12): n is A or 2,6-diaminopurine
  misc_feature (13)..(13): n is C or 5-methylcytosine
  misc_feature (14)..(14): n is U or 5-methyluracil
  misc_feature (17)..(17): n is C or 5-methylcytosine
  misc_feature (18)..(18): n is A or 2,6-diaminopurine
  misc_feature (19)..(19): n is U or 5-methyluracil
  misc_feature (20)..(20): n is C or 5-methylcytosine
  misc_feature (21)..(21): n is U or 5-methyluracil
  misc_feature (23)..(23): n is U or 5-methyluracil
  misc_feature (24)..(24): n is U or 5-methyluracil
  misc_feature (25)..(25): n is U or 5-methyluracil
nnnngnngnnnnnnggnnnnngnnn

SEQ ID NO: 1706 - RNA, 25 nt, Artificial
  Oligonucleotide
  misc_feature (7)..(7): n is 2,6-diaminopurine
  misc_feature (9)..(9): n is 2,6-diaminopurine
  misc_feature (10)..(10): n is 2,6-diaminopurine
  misc_feature (12)..(12): n is 2,6-diaminopurine
  misc_feature (18)..(18): n is 2,6-diaminopurine
uccugungnnuncuggcnucuguuu

SEQ ID NO: 1707 - RNA, 23 nt, Artificial
  Oligonucleotide
  misc_feature (7)..(7): n is 2,6-diaminopurine
  misc_feature (9)..(9): n is 2,6-diaminopurine
  misc_feature (10)..(10): n is 2,6-diaminopurine
  misc_feature (12)..(12): n is 2,6-diaminopurine
  misc_feature (18)..(18): n is 2,6-diaminopurine
uccugungnnuncuggcnucugu

SEQ ID NO: 1708 - RNA, 23 nt, Artificial
  Oligonucleotide
uccuguagaauacuggcaucugu

SEQ ID NO: 1709 - RNA, 23 nt, Artificial
  Oligonucleotide
  misc_feature (1)..(1): n is U or 5-methyluracil
  misc_feature (2)..(2): n is C or 5-methylcytosine
  misc_feature (3)..(3): n is C or 5-methylcytosine
  misc_feature (4)..(4): n is U or 5-methyluracil
  misc_feature (6)..(6): n is U or 5-methyluracil
  misc_feature (7)..(7): n is A or 2,6-diaminopurine
  misc_feature (9)..(9): n is A or 2,6-diaminopurine
  misc_feature (10)..(10): n is A or 2,6-diaminopurine
  misc_feature (11)..(11): n is U or 5-methyluracil
  misc_feature (12)..(12): n is A or 2,6-diaminopurine
  misc_feature (13)..(13): n is C or 5-methylcytosine
  misc_feature (14)..(14): n is U or 5-methyluracil
  misc_feature (17)..(17): n is C or 5-methylcytosine
  misc_feature (18)..(18): n is A or 2,6-diaminopurine
  misc_feature (19)..(19): n is U or 5-methyluracil
  misc_feature (20)..(20): n is C or 5-methylcytosine
  misc_feature (21)..(21): n is U or 5-methyluracil
  misc_feature (23)..(23): n is U or 5-methyluracil
nnnngnngnnnnnnggnnnnngn

SEQ ID NO: 1710 - RNA, 25 nt, Artificial
  Oligonucleotide
  misc_feature (7)..(7): n is 2,6-diaminopurine
  misc_feature (10)..(10): n is 2,6-diaminopurine
  misc_feature (12)..(12): n is 2,6-diaminopurine
  misc_feature (18)..(18): n is 2,6-diaminopurine
uccugunggnunuuggcnguuguuu

SEQ ID NO: 1711 - RNA, 25 nt, Artificial
  Oligonucleotide
uccuguaggauauuggcaguuguuu

SEQ ID NO: 1712 - RNA, 25 nt, Artificial
  Oligonucleotide
  misc_feature (1)..(1): n is U or 5-methyluracil
  misc_feature (2)..(2): n is C or 5-methylcytosine
  misc_feature (3)..(3): n is C or 5-methylcytosine
  misc_feature (4)..(4): n is U or 5-methyluracil
  misc_feature (6)..(6): n is U or 5-methyluracil
  misc_feature (7)..(7): n is A or 2,6-diaminopurine
  misc_feature (10)..(10): n is A or 2,6-diaminopurine
  misc_feature (11)..(11): n is U or 5-methyluracil
  misc_feature (12)..(12): n is A or 2,6-diaminopurine
  misc_feature (13)..(13): n is U or 5-methyluracil
  misc_feature (14)..(14): n is U or 5-methyluracil
  misc_feature (17)..(17): n is C or 5-methylcytosine
  misc_feature (18)..(18): n is A or 2,6-diaminopurine
  misc_feature (20)..(20): n is U or 5-methyluracil
  misc_feature (21)..(21): n is U or 5-methyluracil
  misc_feature (23)..(23): n is U or 5-methyluracil
  misc_feature (24)..(24): n is U or 5-methyluracil
  misc_feature (25)..(25): n is U or 5-methyluracil
nnnngnnggnnnnnggnngnngnnn

SEQ ID NO: 1713 - RNA, 23 nt, Artificial
  Oligonucleotide
  misc_feature (7)..(7): n is 2,6-diaminopurine
  misc_feature (10)..(10): n is 2,6-diaminopurine
  misc_feature (12)..(12): n is 2,6-diaminopurine
  misc_feature (18)..(18): n is 2,6-diaminopurine
uccugunggnunuuggcnguugu

SEQ ID NO: 1714 - RNA, 23 nt, Artificial
  Oligonucleotide
uccuguaggauauuggcaguugu

SEQ ID NO: 1715 - RNA, 23 nt, Artificial
  Oligonucleotide
  misc_feature (1)..(1): n is U or 5-methyluracil
  misc_feature (2)..(2): n is C or 5-methylcytosine
  misc_feature (3)..(3): n is C or 5-methylcytosine
  misc_feature (4)..(4): n is U or 5-methyluracil
  misc_feature (6)..(6): n is U or 5-methyluracil
  misc_feature (7)..(7): n is A or 2,6-diaminopurine
  misc_feature (10)..(10): n is A or 2,6-diaminopurine
  misc_feature (11)..(11): n is U or 5-methyluracil
  misc_feature (12)..(12): n is A or 2,6-diaminopurine
  misc_feature (13)..(13): n is U or 5-methyluracil
  misc_feature (14)..(14): n is U or 5-methyluracil
  misc_feature (17)..(17): n is C or 5-methylcytosine
  misc_feature (18)..(18): n is A or 2,6-diaminopurine
  misc_feature (20)..(20): n is U or 5-methyluracil
  misc_feature (21)..(21): n is U or 5-methyluracil
  misc_feature (23)..(23): n is U or 5-methyluracil
nnnngnnggnnnnnggnngnngn

SEQ ID NO: 1716 - RNA, 23 nt, Artificial
  Oligonucleotide
uccuguaggacauuggcaguugu

SEQ ID NO: 1717 - RNA, 23 nt, Artificial
  Oligonucleotide
  misc_feature (1)..(1): n is U or 5-methyluracil
  misc_feature (2)..(2): n is C or 5-methylcytosine
  misc_feature (3)..(3): n is C or 5-methylcytosine
  misc_feature (4)..(4): n is U or 5-methyluracil
  misc_feature (6)..(6): n is U or 5-methyluracil
  misc_feature (7)..(7): n is A or 2,6-diaminopurine
  misc_feature (10)..(10): n is A or 2,6-diaminopurine
  misc_feature (11)..(11): n is C or 5-methylcytosine
  misc_feature (12)..(12): n is A or 2,6-diaminopurine
  misc_feature (13)..(13): n is U or 5-methyluracil
  misc_feature (14)..(14): n is U or 5-methyluracil
  misc_feature (17)..(17): n is C or 5-methylcytosine
  misc_feature (18)..(18): n is A or 2,6-diaminopurine
  misc_feature (20)..(20): n is U or 5-methyluracil
  misc_feature (21)..(21): n is U or 5-methyluracil
  misc_feature (23)..(23): n is U or 5-methyluracil
nnnngnnggnnnnnggnngnngn

SEQ ID NO: 1718 - RNA, 25 nt, Artificial
  Oligonucleotide
uccuguaggacauuggcaguuguuu

SEQ ID NO: 1719 - RNA, 25 nt, Artificial
  Oligonucleotide
  misc_feature (1)..(1): n is U or 5-methyluracil
  misc_feature (2)..(2): n is C or 5-methylcytosine
  misc_feature (3)..(3): n is C or 5-methylcytosine
  misc_feature (4)..(4): n is U or 5-methyluracil
  misc_feature (6)..(6): n is U or 5-methyluracil
  misc_feature (7)..(7): n is A or 2,6-diaminopurine
  misc_feature (10)..(10): n is A or 2,6-diaminopurine
  misc_feature (11)..(11): n is C or 5-methylcytosine
  misc_feature (12)..(12): n is A or 2,6-diaminopurine
  misc_feature (13)..(13): n is U or 5-methyluracil
  misc_feature (14)..(14): n is U or 5-methyluracil
  misc_feature (17)..(17): n is C or 5-methylcytosine
  misc_feature (18)..(18): n is A or 2,6-diaminopurine
  misc_feature (20)..(20): n is U or 5-methyluracil
  misc_feature (21)..(21): n is U or 5-methyluracil
  misc_feature (23)..(23): n is U or 5-methyluracil
  misc_feature (24)..(24): n is U or 5-methyluracil
  misc_feature (25)..(25): n is U or 5-methyluracil
nnnngnnggnnnnnggnngnngnnn

SEQ ID NO: 1720 - RNA, 29 nt, Artificial
  Oligonucleotide
  misc_feature (1)..(1): n is U or 5-methyluracil
  misc_feature (2)..(2): n is C or 5-methylcytosine
  misc_feature (3)..(3): n is U or 5-methyluracil
  misc_feature (5)..(5): n is U or 5-methyluracil
  misc_feature (7)..(7): n is U or 5-methyluracil
  misc_feature (9)..(9): n is A or 2,6-diaminopurine
  misc_feature (11)..(11): n is C or 5-methylcytosine
  misc_feature (12)..(12): n is U or 5-methyluracil
  misc_feature (13)..(13): n is U or 5-methyluracil
  misc_feature (14)..(14): n is C or 5-methylcytosine
  misc_feature (15)..(15): n is A or 2,6-diaminopurine
  misc_feature (16)..(16): n is A or 2,6-diaminopurine
  misc_feature (17)..(17): n is U or 5-methyluracil
  misc_feature (18)..(18): n is U or 5-methyluracil
  misc_feature (19)..(19): n is U or 5-methyluracil
  misc_feature (20)..(20): n is C or 5-methylcytosine
  misc_feature (21)..(21): n is A or 2,6-diaminopurine
  misc_feature (22)..(22): n is C or 5-methylcytosine
  misc_feature (23)..(23): n is C or 5-methylcytosine
  misc_feature (24)..(24): n is U or 5-methyluracil
  misc_feature (25)..(25): n is U or 5-methyluracil
  misc_feature (28)..(28): n is A or 2,6-diaminopurine
nnngngngngnnnnnnnnnnnnnnnggng

SEQ ID NO: 1721 - RNA, 29 nt, Artificial
  Oligonucleotide
  misc_feature (1)..(1): n is U or 5-methyluracil
  misc_feature (3)..(3): n is U or 5-methyluracil
  misc_feature (4)..(4): n is U or 5-methyluracil
  misc_feature (5)..(5): n is U or 5-methyluracil
  misc_feature (6)..(6): n is C or 5-methylcytosine
  misc_feature (7)..(7): n is A or 2,6-diaminopurine
  misc_feature (9)..(9): n is A or 2,6-diaminopurine
  misc_feature (12)..(12): n is C or 5-methylcytosine
  misc_feature (14)..(14): n is C or 5-methylcytosine
  misc_feature (15)..(15): n is A or 2,6-diaminopurine
  misc_feature (16)..(16): n is A or 2,6-diaminopurine
  misc_feature (17)..(17): n is U or 5-methyluracil
  misc_feature (18)..(18): n is U or 5-methyluracil
  misc_feature (19)..(19): n is U or 5-methyluracil
  misc_feature (20)..(20): n is C or 5-methylcytosine
  misc_feature (21)..(21): n is U or 5-methyluracil
  misc_feature (22)..(22): n is C or 5-methylcytosine
  misc_feature (23)..(23): n is C or 5-methylcytosine
  misc_feature (24)..(24): n is U or 5-methyluracil
  misc_feature (25)..(25): n is C or 5-methylcytosine
  misc_feature (27)..(27): n is A or 2,6-diaminopurine
  misc_feature (28)..(28): n is A or 2,6-diaminopurine
ncnnnnngnggngnnnnnnnnnnnngnng

SEQ ID NO: 1722 - RNA, 18 nt, Artificial
  Oligonucleotide
  misc_feature (1)..(1): n is U or 5-methyluracil
  misc_feature (4)..(4): n is A or 2,6-diaminopurine
  misc_feature (5)..(5): n is C or 5-methylcytosine
  misc_feature (6)..(6): n is U or 5-methyluracil
  misc_feature (7)..(7): n is U or 5-methyluracil
  misc_feature (8)..(8): n is C or 5-methylcytosine
  misc_feature (9)..(9): n is U or 5-methyluracil
  misc_feature (10)..(10): n is U or 5-methyluracil
  misc_feature (11)..(11): n is A or 2,6-diaminopurine
  misc_feature (12)..(12): n is U or 5-methyluracil
  misc_feature (13)..(13): n is C or 5-methylcytosine
  misc_feature (14)..(14): n is U or 5-methyluracil
  misc_feature (17)..(17): n is A or 2,6-diaminopurine
  misc_feature (18)..(18): n is U or 5-methyluracil
nggnnnnnnnnnnnggnn

SEQ ID NO: 1723 - RNA, 17 nt, Artificial
  Oligonucleotide
  misc_feature (1)..(1): n is U or 5-methyluracil
  misc_feature (2)..(2): n is C or 5-methylcytosine
  misc_feature (3)..(3): n is U or 5-methyluracil
  misc_feature (5)..(5): n is A or 2,6-diaminopurine
  misc_feature (6)..(6): n is A or 2,6-diaminopurine
  misc_feature (7)..(7): n is C or 5-methylcytosine
  misc_feature (8)..(8): n is U or 5-methyluracil
  misc_feature (9)..(9): n is U or 5-methyluracil
  misc_feature (10)..(10): n is C or 5-methylcytosine
  misc_feature (11)..(11): n is U or 5-methyluracil
  misc_feature (12)..(12): n is C or 5-methylcytosine
  misc_feature (13)..(13): n is A or 2,6-diaminopurine
  misc_feature (15)..(15): n is C or 5-methylcytosine
  misc_feature (16)..(16): n is U or 5-methyluracil
  misc_feature (17)..(17): n is U or 5-methyluracil
nnngnnnnnnnnngnnn

SEQ ID NO: 1724 - RNA, 19 nt, Artificial
  Oligonucleotide
  misc_feature (1)..(1): n is U or 5-methyluracil
  misc_feature (2)..(2): n is C or 5-methylcytosine
  misc_feature (3)..(3): n is A or 2,6-diaminopurine
  misc_feature (5)..(5): n is A or 2,6-diaminopurine
  misc_feature (8)..(8): n is U or 5-methyluracil
  misc_feature (11)..(11): n is U or 5-methyluracil
  misc_feature (13)..(13): n is A or 2,6-diaminopurine
  misc_feature (14)..(14): n is C or 5-methylcytosine
  misc_feature (15)..(15): n is A or 2,6-diaminopurine
  misc_feature (16)..(16): n is U or 5-methyluracil
  misc_feature (17)..(17): n is A or 2,6-diaminopurine
  misc_feature (18)..(18): n is A or 2,6-diaminopurine
nnngnggnggngnnnnnng

SEQ ID NO: 1725 - RNA, 20 nt, Artificial
  Oligonucleotide
  misc_feature (1)..(1): n is U or 5-methyluracil
  misc_feature (2)..(2): n is C or 5-methylcytosine
  misc_feature (3)..(3): n is A or 2,6-diaminopurine
  misc_feature (4)..(4): n is U or 5-methyluracil
  misc_feature (5)..(5): n is A or 2,6-diaminopurine
  misc_feature (7)..(7): n is U or 5-methyluracil
  misc_feature (8)..(8): n is C or 5-methylcytosine
  misc_feature (11)..(11): n is U or 5-methyluracil
  misc_feature (13)..(13): n is A or 2,6-diaminopurine
  misc_feature (14)..(14): n is C or 5-methylcytosine
  misc_feature (15)..(15): n is A or 2,6-diaminopurine
  misc_feature (16)..(16): n is C or 5-methylcytosine
  misc_feature (17)..(17): n is U or 5-methyluracil
  misc_feature (18)..(18): n is A or 2,6-diaminopurine
  misc_feature (19)..(19): n is A or 2,6-diaminopurine
nnnnngnnggngnnnnnnng

SEQ ID NO: 1726 - RNA, 23 nt, Artificial
  Oligonucleotide
  misc_feature (1)..(1): n is U or 5-methyluracil
  misc_feature (2)..(2): n is C or 5-methylcytosine
  misc_feature (3)..(3): n is U or 5-methyluracil
  misc_feature (4)..(4): n is C or 5-methylcytosine
  misc_feature (5)..(5): n is A or 2,6-diaminopurine
  misc_feature (6)..(6): n is U or 5-methyluracil
  misc_feature (7)..(7): n is A or 2,6-diaminopurine
  misc_feature (8)..(8): n is U or 5-methyluracil
  misc_feature (9)..(9): n is C or 5-methylcytosine
  misc_feature (10)..(10): n is C or 5-methylcytosine
  misc_feature (11)..(11): n is C or 5-methylcytosine
  misc_feature (12)..(12): n is U or 5-methyluracil
  misc_feature (14)..(14): n is U or 5-methyluracil
  misc_feature (16)..(16): n is C or 5-methylcytosine
  misc_feature (17)..(17): n is U or 5-methyluracil
  misc_feature (18)..(18): n is A or 2,6-diaminopurine
  misc_feature (20)..(20): n is A or 2,6-diaminopurine
  misc_feature (21)..(21): n is C or 5-methylcytosine
  misc_feature (22)..(22): n is U or 5-methyluracil
nnnnnnnnnnnngngnnngnnng

SEQ ID NO: 1727 - RNA, 23 nt, Artificial
  Oligoncleotide
  misc_feature (2)..(2): n is A or 2,6-diaminopurine
  misc_feature (3)..(3): n is A or 2,6-diaminopurine
  misc_feature (4)..(4): n is U or 5-methyluracil
  misc_feature (5)..(5): n is C or 5-methylcytosine
  misc_feature (7)..(7): n is A or 2,6-diaminopurine
  misc_feature (10)..(10): n is C or 5-methylcytosine
  misc_feature (11)..(11): n is U or 5-methyluracil
  misc_feature (12)..(12): n is U or 5-methyluracil
  misc_feature (13)..(13): n is A or 2,6-diaminopurine
  misc_feature (16)..(16): n is U or 5-methyluracil
  misc_feature (18)..(18): n is A or 2,6-diaminopurine
  misc_feature (19)..(19): n is A or 2,6-diaminopurine
  misc_feature (21)..(21): n is A or 2,6-diaminopurine
  misc_feature (22)..(22): n is A or 2,6-diaminopurine
gnnnngnggnnnnggngnngnng

SEQ ID NO: 1728 - RNA, 21 nt, Artificial
  Oligonucleotide
  misc_feature (1)..(1): n is U or 5-methyluracil
  misc_feature (2)..(2): n is U or 5-methyluracil
  misc_feature (3)..(3): n is C or 5-methylcytosine
  misc_feature (4)..(4): n is A or 2,6-diaminopurine
  misc_feature (6)..(6): n is U or 5-methyluracil
  misc_feature (7)..(7): n is C or 5-methylcytosine
  misc_feature (8)..(8): n is U or 5-methyluracil
  misc_feature (9)..(9): n is C or 5-methylcytosine
  misc_feature (10)..(10): n is C or 5-methylcytosine
  misc_feature (11)..(11): n is U or 5-methyluracil
  misc_feature (15)..(15): n is C or 5-methylcytosine
  misc_feature (16)..(16): n is A or 2,6-diaminopurine
  misc_feature (18)..(18): n is A or 2,6-diaminopurine
  misc_feature (19)..(19): n is C or 5-methylcytosine
  misc_feature (20)..(20): n is U or 5-methyluracil
nnnngnnnnnngggnngnnng

SEQ ID NO: 1729 - RNA, 22 nt, Artificial
  Oligonucleotide
  misc_feature (2)..(2): n is A or 2,6-diaminopurine
  misc_feature (3)..(3): n is C or 5-methylcytosine
  misc_feature (4)..(4): n is U or 5-methyluracil
  misc_feature (5)..(5): n is C or 5-methylcytosine
  misc_feature (6)..(6): n is C or 5-methylcytosine
  misc_feature (7)..(7): n is U or 5-methyluracil
  misc_feature (10)..(10): n is A or 2,6-diaminopurine
  misc_feature (11)..(11): n is U or 5-methyluracil
  misc_feature (12)..(12): n is U or 5-methyluracil
  misc_feature (13)..(13): n is A or 2,6-diaminopurine
  misc_feature (14)..(14): n is A or 2,6-diaminopurine
  misc_feature (16)..(16): n is U or 5-methyluracil
  misc_feature (18)..(18): n is U or 5-methyluracil
  misc_feature (19)..(19): n is A or 2,6-diaminopurine
  misc_feature (20)..(20): n is A or 2,6-diaminopurine
gnnnnnnggnnnnngngnnngg

SEQ ID NO: 1730 - RNA, 25 nt, Artificial
  Oligonucleotide
  misc_feature (1)..(1): n is U or 5-methyluracil
  misc_feature (4)..(4): n is C or 5-methylcytosine
  misc_feature (5)..(5): n is A or 2,6-diaminopurine
  misc_feature (6)..(6): n is U or 5-methyluracil
  misc_feature (7)..(7): n is C or 5-methylcytosine
  misc_feature (8)..(8): n is U or 5-methyluracil
  misc_feature (10)..(10): n is U or 5-methyluracil
  misc_feature (12)..(12): n is U or 5-methyluracil
  misc_feature (13)..(13): n is U or 5-methyluracil
  misc_feature (14)..(14): n is U or 5-methyluracil
  misc_feature (16)..(16): n is A or 2,6-diaminopurine
  misc_feature (19)..(19): n is A or 2,6-diaminopurine
  misc_feature (20)..(20): n is U or 5-methyluracil
  misc_feature (21)..(21): n is U or 5-methyluracil
  misc_feature (23)..(23): n is C or 5-methylcytosine
  misc_feature (24)..(24): n is U or 5-methyluracil
nggnnnnngngnnngnggnnngnng

SEQ ID NO: 1731 - RNA, 26 nt, Artificial
  Oligonucleotide
  misc_feature (1)..(1): n is U or 5-methyluracil
  misc_feature (4)..(4): n is C or 5-methylcytosine
  misc_feature (5)..(5): n is A or 2,6-diaminopurine
  misc_feature (6)..(6): n is U or 5-methyluracil
  misc_feature (7)..(7): n is U or 5-methyluracil
  misc_feature (8)..(8): n is U or 5-methyluracil
  misc_feature (9)..(9): n is C or 5-methylcytosine
  misc_feature (10)..(10): n is U or 5-methyluracil
  misc_feature (11)..(11): n is A or 2,6-diaminopurine
  misc_feature (13)..(13): n is U or 5-methyluracil
  misc_feature (14)..(14): n is U or 5-methyluracil
  misc_feature (15)..(15): n is U or 5-methyluracil
  misc_feature (18)..(18): n is A or 2,6-diaminopurine
  misc_feature (20)..(20): n is A or 2,6-diaminopurine
  misc_feature (21)..(21): n is U or 5-methyluracil
  misc_feature (24)..(24): n is C or 5-methylcytosine
  misc_feature (25)..(25): n is A or 2,6-diaminopurine
nggnnnnnnnngnnnggngnnggnng

SEQ ID NO: 1732 - RNA, 26 nt, Artificial
  Oligonucleotide
  misc_feature (1)..(1): n is U or 5-methyluracil
  misc_feature (2)..(2): n is U or 5-methyluracil
  misc_feature (3)..(3): n is C or 5-methylcytosine
  misc_feature (4)..(4): n is C or 5-methylcytosine
  misc_feature (5)..(5): n is A or 2,6-diaminopurine
  misc_feature (6)..(6): n is C or 5-methylcytosine
  misc_feature (7)..(7): n is A or 2,6-diaminopurine
  misc_feature (9)..(9): n is U or 5-methyluracil
  misc_feature (10)..(10): n is U or 5-methyluracil
  misc_feature (12)..(12): n is C or 5-methylcytosine
  misc_feature (13)..(13): n is A or 2,6-diaminopurine
  misc_feature (14)..(14): n is U or 5-methyluracil
  misc_feature (15)..(15): n is U or 5-methyluracil
  misc_feature (16)..(16): n is C or 5-methylcytosine
  misc_feature (17)..(17): n is A or 2,6-diaminopurine
  misc_feature (18)..(18): n is A or 2,6-diaminopurine
  misc_feature (19)..(19): n is U or 5-methyluracil
  misc_feature (21)..(21): n is U or 5-methyluracil
  misc_feature (22)..(22): n is U or 5-methyluracil
  misc_feature (23)..(23): n is C or 5-methylcytosine
  misc_feature (24)..(24): n is U or 5-methyluracil
  misc_feature (26)..(26): n is A or 2,6-diaminopurine
nnnnnnngnngnnnnnnnngnnnngn

SEQ ID NO: 1733 - RNA, 24 nt, Artificial
  Oligonucleotide
  misc_feature (1)..(1): n is U or 5-methyluracil
  misc_feature (2)..(2): n is U or 5-methyluracil
  misc_feature (3)..(3): n is C or 5-methylcytosine
  misc_feature (4)..(4): n is A or 2,6-diaminopurine
  misc_feature (5)..(5): n is A or 2,6-diaminopurine
  misc_feature (6)..(6): n is C or 5-methylcytosine
  misc_feature (7)..(7): n is U or 5-methyluracil
  misc_feature (9)..(9): n is U or 5-methyluracil
  misc_feature (10)..(10): n is U or 5-methyluracil
  misc_feature (12)..(12): n is C or 5-methylcytosine
  misc_feature (13)..(13): n is C or 5-methylcytosine
  misc_feature (14)..(14): n is U or 5-methyluracil
  misc_feature (15)..(15): n is C or 5-methylcytosine
  misc_feature (16)..(16): n is C or 5-methylcytosine
  misc_feature (17)..(17): n is A or 2,6-diaminopurine
  misc_feature (19)..(19): n is U or 5-methyluracil
  misc_feature (20)..(20): n is U or 5-methyluracil
  misc_feature (21)..(21): n is C or 5-methylcytosine
  misc_feature (22)..(22): n is U or 5-methyluracil
  misc_feature (24)..(24): n is A or 2,6-diaminopurine
nnnnnnngnngnnnnnngnnnngn

SEQ ID NO: 1734 - RNA, 24 nt, Artificial
  Oligonucleotide
  misc_feature (1)..(1): n is U or 5-methyluracil
  misc_feature (2)..(2): n is U or 5-methyluracil
  misc_feature (3)..(3): n is C or 5-methylcytosine
  misc_feature (4)..(4): n is C or 5-methylcytosine
  misc_feature (5)..(5): n is U or 5-methyluracil
  misc_feature (7)..(7): n is U or 5-methyluracil
  misc_feature (8)..(8): n is A or 2,6-diaminopurine
  misc_feature (10)..(10): n is A or 2,6-diaminopurine
  misc_feature (11)..(11): n is A or 2,6-diaminopurine
  misc_feature (12)..(12): n is U or 5-methyluracil
  misc_feature (13)..(13): n is A or 2,6-diaminopurine
  misc_feature (14)..(14): n is C or 5-methylcytosine
  misc_feature (15)..(15): n is U or 5-methyluracil
  misc_feature (18)..(18): n is C or 5-methylcytosine
  misc_feature (19)..(19): n is A or 2,6-diaminopurine
  misc_feature (20)..(20): n is U or 5-methyluracil
  misc_feature (21)..(21): n is C or 5-methylcytosine
  misc_feature (22)..(22): n is U or 5-methyluracil
  misc_feature (24)..(24): n is U or 5-methyluracil
nnnnngnngnnnnnnggnnnnngn

SEQ ID NO: 1735 - RNA, 24 nt, Artificial
  Oligonucleotide
  misc_feature (1)..(1): n is U or 5-methyluracil
  misc_feature (2)..(2): n is U or 5-methyluracil
  misc_feature (3)..(3): n is C or 5-methylcytosine
  misc_feature (4)..(4): n is A or 2,6-diaminopurine
  misc_feature (5)..(5): n is A or 2,6-diaminopurine
  misc_feature (6)..(6): n is C or 5-methylcytosine
  misc_feature (7)..(7): n is U or 5-methyluracil
  misc_feature (9)..(9): n is U or 5-methyluracil
  misc_feature (10)..(10): n is U or 5-methyluracil
  misc_feature (12)..(12): n is C or 5-methylcytosine
  misc_feature (13)..(13): n is C or 5-methylcytosine
  misc_feature (14)..(14): n is U or 5-methyluracil
  misc_feature (15)..(15): n is C or 5-methylcytosine
  misc_feature (16)..(16): n is C or 5-methylcytosine
  misc_feature (19)..(19): n is U or 5-methyluracil
  misc_feature (20)..(20): n is U or 5-methyluracil
  misc_feature (21)..(21): n is C or 5-methylcytosine
  misc_feature (22)..(22): n is U or 5-methyluracil
  misc_feature (24)..(24): n is A or 2,6-diaminopurine
nnnnnnngnngnnnnnggnnnngn

SEQ ID NO: 1736 - RNA, 25 nt, Artificial
  Oligonucleotide
  misc_feature (1)..(1): n is C or 5-methylcytosine
  misc_feature (2)..(2): n is U or 5-methyluracil
  misc_feature (3)..(3): n is U or 5-methyluracil
  misc_feature (4)..(4): n is U or 5-methyluracil
  misc_feature (5)..(5): n is A or 2,6-diaminopurine
  misc_feature (6)..(6): n is A or 2,6-diaminopurine
  misc_feature (7)..(7): n is C or 5-methylcytosine
  misc_feature (8)..(8): n is A or 2,6-diaminopurine
  misc_feature (9)..(9): n is U or 5-methyluracil
  misc_feature (10)..(10): n is U or 5-methyluracil
  misc_feature (11)..(11): n is U or 5-methyluracil
  misc_feature (12)..(12): n is C or 5-methylcytosine
  misc_feature (13)..(13): n is A or 2,6-diaminopurine
  misc_feature (14)..(14): n is U or 5-methyluracil
  misc_feature (15)..(15): n is U or 5-methyluracil
  misc_feature (16)..(16): n is C or 5-methylcytosine
  misc_feature (17)..(17): n is A or 2,6-diaminopurine
  misc_feature (18)..(18): n is A or 2,6-diaminopurine
  misc_feature (19)..(19): n is C or 5-methylcytosine
  misc_feature (20)..(20): n is U or 5-methyluracil
  misc_feature (22)..(22): n is U or 5-methyluracil
  misc_feature (23)..(23): n is U or 5-methyluracil
  misc_feature (25)..(25): n is C or 5-methylcytosine
nnnnnnnnnnnnnnnnnnnngnngn

SEQ ID NO: 1737 - RNA, 28 nt, Artificial
  Oligonucleotide
  misc_feature (1)..(1): n is U or 5-methyluracil
  misc_feature (2)..(2): n is U or 5-methyluracil
  misc_feature (3)..(3): n is C or 5-methylcytosine
  misc_feature (4)..(4): n is U or 5-methyluracil
  misc_feature (5)..(5): n is U or 5-methyluracil
  misc_feature (6)..(6): n is C or 5-methylcytosine
  misc_feature (7)..(7): n is C or 5-methylcytosine
  misc_feature (8)..(8): n is U or 5-methyluracil
  misc_feature (9)..(9): n is U or 5-methyluracil
  misc_feature (10)..(10): n is A or 2,6-diaminopurine
  misc_feature (12)..(12): n is C or 5-methylcytosine
  misc_feature (13)..(13): n is U or 5-methyluracil
  misc_feature (14)..(14): n is U or 5-methyluracil
  misc_feature (15)..(15): n is C or 5-methylcytosine
  misc_feature (16)..(16): n is C or 5-methylcytosine
  misc_feature (17)..(17): n is A or 2,6-diaminopurine
  misc_feature (19)..(19): n is C or 5-methylcytosine
  misc_feature (20)..(20): n is C or 5-methylcytosine
  misc_feature (21)..(21): n is A or 2,6-diaminopurine
  misc_feature (22)..(22): n is U or 5-methyluracil
  misc_feature (23)..(23): n is U or 5-methyluracil
  misc_feature (25)..(25): n is U or 5-methyluracil
  misc_feature (27)..(27): n is U or 5-methyluracil
  misc_feature (28)..(28): n is U or 5-methyluracil
nnnnnnnnnngnnnnnngnnnnngngnn

SEQ ID NO: 1738 - RNA, 23 nt, Artificial
  Oligonucleotide
  misc_feature (1)..(1): n is A or 2,6-diaminopurine
  misc_feature (2)..(2): n is A or 2,6-diaminopurine
  misc_feature (3)..(3): n is U or 5-methyluracil
  misc_feature (4)..(4): n is A or 2,6-diaminopurine
  misc_feature (5)..(5): n is C or 5-methylcytosine
  misc_feature (6)..(6): n is U or 5-methyluracil
  misc_feature (9)..(9): n is C or 5-methylcytosine
  misc_feature (10)..(10): n is A or 2,6-diaminopurine
  misc_feature (11)..(11): n is U or 5-methyluracil
  misc_feature (12)..(12): n is C or 5-methylcytosine
  misc_feature (13)..(13): n is U or 5-methyluracil
  misc_feature (15)..(15): n is U or 5-methyluracil
  misc_feature (16)..(16): n is U or 5-methyluracil
  misc_feature (18)..(18): n is U or 5-methyluracil
  misc_feature (19)..(19): n is U or 5-methyluracil
  misc_feature (21)..(21): n is A or 2,6-diaminopurine
nnnnnnggnnnnngnngnngngg

SEQ ID NO: 1739 - RNA, 22 nt, Artificial
  Oligonucleotide
  misc_feature (1)..(1): n is C or 5-methylcytosine
  misc_feature (2)..(2): n is U or 5-methyluracil
  misc_feature (4)..(4): n is U or 5-methyluracil
  misc_feature (5)..(5): n is A or 2,6-diaminopurine
  misc_feature (7)..(7): n is A or 2,6-diaminopurine
  misc_feature (8)..(8): n is A or 2,6-diaminopurine
  misc_feature (9)..(9): n is U or 5-methyluracil
  misc_feature (10)..(10): n is A or 2,6-diaminopurine
  misc_feature (11)..(11): n is C or 5-methylcytosine
  misc_feature (12)..(12): n is U or 5-methyluracil
  misc_feature (15)..(15): n is C or 5-methylcytosine
  misc_feature (16)..(16): n is A or 2,6-diaminopurine
  misc_feature (17)..(17): n is U or 5-methyluracil
  misc_feature (18)..(18): n is C or 5-methylcytosine
  misc_feature (19)..(19): n is U or 5-methyluracil
  misc_feature (21)..(21): n is U or 5-methyluracil
  misc_feature (22)..(22): n is U or 5-methyluracil
nngnngnnnnnnggnnnnngnn

SEQ ID NO: 1740 - RNA, 20 nt, Artificial
  Oligonucleotide
  misc_feature (2)..(2): n is C or 5-methylcytosine
  misc_feature (3)..(3): n is U or 5-methyluracil
  misc_feature (4)..(4): n is U or 5-methyluracil
  misc_feature (5)..(5): n is C or 5-methylcytosine
  misc_feature (6)..(6): n is C or 5-methylcytosine
  misc_feature (7)..(7): n is A or 2,6-diaminopurine
  misc_feature (8)..(8): n is U or 5-methyluracil
  misc_feature (9)..(9): n is C or 5-methylcytosine
  misc_feature (10)..(10): n is U or 5-methyluracil
  misc_feature (13)..(13): n is U or 5-methyluracil
  misc_feature (15)..(15): n is U or 5-methyluracil
  misc_feature (16)..(16): n is U or 5-methyluracil
  misc_feature (17)..(17): n is C or 5-methylcytosine
  misc_feature (18)..(18): n is A or 2,6-diaminopurine
gnnnnnnnnnggngnnnngg

SEQ ID NO: 1741 - RNA, 21 nt, Artificial
  Oligonucleotide
  misc_feature (1)..(1): n is C or 5-methylcytosine
  misc_feature (2)..(2): n is U or 5-methyluracil
  misc_feature (4)..(4): n is C or 5-methylcytosine
  misc_feature (5)..(5): n is A or 2,6-diaminopurine
  misc_feature (7)..(7): n is A or 2,6-diaminopurine
  misc_feature (8)..(8): n is A or 2,6-diaminopurine
  misc_feature (10)..(10): n is C or 5-methylcytosine
  misc_feature (11)..(11): n is U or 5-methyluracil
  misc_feature (12)..(12): n is U or 5-methyluracil
  misc_feature (13)..(13): n is C or 5-methylcytosine
  misc_feature (14)..(14): n is C or 5-methylcytosine
  misc_feature (15)..(15): n is A or 2,6-diaminopurine
  misc_feature (16)..(16): n is U or 5-methyluracil
  misc_feature (17)..(17): n is C or 5-methylcytosine
  misc_feature (18)..(18): n is U or 5-methyluracil
  misc_feature (21)..(21): n is U or 5-methyluracil
nngnngnngnnnnnnnnnggn

SEQ ID NO: 1742 - RNA, 29 nt, Artificial
  Part of exon 56 of the human dystrophin transcript
cuccaaggugaaauugaagcucacacaga

SEQ ID NO: 1743 - RNA, 29 nt, Artificial
  Part of exon 60 of the human dystrophin transcript
cuucgaggagaaauugcgccucugaaaga

SEQ ID NO: 1744 - RNA, 157 nt, Artificial
  Exon 57 of the human dystrophin transript
gucccauuuggaagccaguucugaccaguggaagcgucugcaccuuucucugcaggaacuucugguguggcuacagcugaaagaugaugaauuaagccggcaggcaccuauuggaggcgacuuuccagcaguucagaagcagaacgauguacauagg

SEQ ID NO: 1745 - DNA, 20 bp, Artificial
  Primer
agtcagccacacaacgactg

SEQ ID NO: 1746 - DNA, 23 bp, Artificial
  Primer
caaggccacctaaagtgactaaa

SEQ ID NO: 1747 - DNA, 20 bp, Artificial
  Primer
gagctatgcctacacacagg

SEQ ID NO: 1748 - DNA, 19 bp, Artificial
  Primer
cctgtggaaagggtgaagc

SEQ ID NO: 1749 - DNA, 20 bp, Artificial
  Primer
gcgatttgacagatctgttg

SEQ ID NO: 1750 - DNA, 21 bp, Artificial
  Primer
gcatcttgcagttttctgaac

SEQ ID NO: 1751 - DNA, 20 bp, Artificial
  Primer
actggcagaattcgatccac

SEQ ID NO: 1752 - DNA, 21 bp, Artificial
  Primer
tgtgcaacatcaatctgagac

SEQ ID NO: 1753 - DNA, 20 bp, Artificial
  Primer
tagacgctgctcaaaattgg

SEQ ID NO: 1754 - DNA, 18 bp, Artificial
  Primer
cactggctgagtggctgg

SEQ ID NO: 1755 - DNA, 19 bp, Artificial
  Primer
tcagtccaggagctaggtc

SEQ ID NO: 1756 - DNA, 20 bp, Artificial
  Primer
cgtctttgtaacaggactgc

SEQ ID NO: 1757 - DNA, 20 bp, Artificial
  Primer
tctgaactgctggaaagtcg

SEQ ID NO: 1758 - DNA, 21 bp, Artificial
  Primer
gagctctgtcattttgggatg

SEQ ID NO: 1759 - DNA, 21 bp, Artificial
  Primer
gggccttctgcagtcttcgga

SEQ ID NO: 1760 - RNA, 233 nt, Artificial
  Exon 51 of the human dystrophin transcript
cuccuacucagacuguuacucuggugacacaaccugugguuacuaaggaaacugccaucuccaaacuagaaaugccaucuuccuugauguuggagguaccugcucuggcagauuucaaccgggcuuggacagaacuuaccgacuggcuuucucugcuugaucaaguuauaaaaucacagagggugauggugggugaccuugaggauaucaacgagaugaucaucaagcagaag

SEQ ID NO: 1761 - RNA, 182 nt, Artificial
  Exon 11 of the human dystrophin transcript
ggguacaugauggauuugacagcccaucagggccggguugguaauauucuacaauugggaaguaagcugauuggaacaggaaaauuaucagaagaugaagaaacugaaguacaagagcagaugaaucuccuaaauucaagaugggaaugccucaggguagcuagcauggaaaaacaaagcaa

SEQ ID NO: 1762 - RNA, 120 nt, Artificial
  Exon 13 of the human dystrophin transcript
gugcuucaagaagaucuagaacaagaacaagucagggucaauucucucacucacaugguggugguaguugaugaaucuaguggagaucacgcaacugcugcuuuggaagaacaacuuaag

SEQ ID NO: 1763 - RNA, 171 nt, Artificial
  Exon 34 of the human dystrophin transcript
guaacagaaagaaagcaacaguuggagaaaugcuugaaauugucccguaagaugcgaaaggaaaugaaugucuugacagaauggcuggcagcuacagauauggaauugacaaagagaucagcaguugaaggaaugccuaguaauuuggauucugaaguugccuggggaaag

SEQ ID NO: 1764 - RNA, 153 nt, Artificial
  Exon 40 of the human dystrophin transcript
gauuugaggucucaaagaagaaaaaaggcucuagaaauuucucaucagugguaucaguacaagaggcaggcugaugaucuccugaaaugcuuggaugacauugaaaaaaaauuagccagccuaccugagcccagagaugaaaggaaaauaaag

SEQ ID NO: 1765 - RNA, 148 nt, Artificial
  Exon 44 of the human dystrophin transcript
gcgauuugacagaucuguugagaaauggcggcguuuucauuaugauauaaagauauuuaaucaguggcuaacagaagcugaacaguuucucagaaagacacaaauuccugagaauugggaacaugcuaaauacaaaugguaucuuaag

SEQ ID NO: 1766 - RNA, 14 nt, Artificial
  Part of exon 10 of the human dystrophin transcript
cagcuuuagaagaa

SEQ ID NO: 1767 - RNA, 14 nt, Artificial
  Part of exon 18 of the human dystrophin transcript
cagacuuaaaagaa

SEQ ID NO: 1768 - RNA, 19 nt, Artificial
  Part of exon 10 of the human dystrophin transcript
auuucuaaugauguggaag

SEQ ID NO: 1769 - RNA, 19 nt, Artificial
  Part of exon 18 of the human dystrophin transcript
auuugcaaucuuucggaag

SEQ ID NO: 1770 - RNA, 24 nt, Artificial
  Part of exon 10 of the human dystrophin transcript
cauuuggaagcuccugaagacaag

SEQ ID NO: 1771 - RNA, 27 nt, Artificial
  Part of exon 30 of the human dystrophin transcript
caguuggcagcuuauauugcagacaag

SEQ ID NO: 1772 - RNA, 35 nt, Artificial
  Part of exon 10 of the human dystrophin transcript
ggagagugaaguaaaccuggaccguuaucaaacag

SEQ ID NO: 1773 - RNA, 34 nt, Artificial
  Part of exon 30 of the human dystrophin transcript
ggagacugaaaaauccuuacacuuaauccaggag

SEQ ID NO: 1774 - RNA, 18 nt, Artificial
  Part of exon 45 of the human dystrophin transcript
augcaacuggggaagaaa

SEQ ID NO: 1775 - RNA, 18 nt, Artificial
  Part of exon 55 of the human dystrophin transcript
aggcugcuuuggaagaaa

SEQ ID NO: 1776 - RNA, 27 nt, Artificial
  Part of exon 45 of the human dystrophin transcript
agccugaaucugcgguggcaggagguc

SEQ ID NO: 1777 - RNA, 27 nt, Artificial
  Part of exon 55 of the human dystrophin transcript
agcgagaggcugcuuuggaagaaacuc

SEQ ID NO: 1778 - RNA, 25 nt, Artificial
  Oligonucleotide
  misc_feature (1)..(1): n is LNA-5-methylcytosine
nugccaaaugacuugucuucaggag

SEQ ID NO: 1779 - RNA, 22 nt, Artificial
  Oligonucleotide
gucugagaaguugccuuccuuc

SEQ ID NO: 1780 - RNA, 22 nt, Artificial
  Oligonucleotide
augaacugccaaaugacuuguc

SEQ ID NO: 1781 - RNA, 25 nt, Artificial
  Oligonucleotide
acuugucuucaggagcuuccaaaug

SEQ ID NO: 1782 - RNA, 21 nt, Artificial
  Oligonucleotide
gucuucaggagcuuccaaaug

SEQ ID NO: 1783 - RNA, 17 nt, Artificial
  Oligonucleotide
cuucuaaagcuguuuga

SEQ ID NO: 1784 - RNA, 21 nt, Artificial
  Oligonucleotide
auaagcugccaacugcuuguc

SEQ ID NO: 1785 - RNA, 25 nt, Artificial
  Oligonucleotide
auuugagcugcguccaccuugucug

SEQ ID NO: 1786 - RNA, 25 nt, Artificial
  Oligonucleotide
cugggcuuccugaggcauuugagcu

SEQ ID NO: 1787 - RNA, 26 nt, Artificial
  Oligonucleotide
gacuccuggauuaaguguaaggauuu

SEQ ID NO: 1788 - RNA, 24 nt, Artificial
  Oligonucleotide
cauccuguaggacauuggcaguug

SEQ ID NO: 1789 - RNA, 24 nt, Artificial
  Oligonucleotide
cuguaggacauuggcaguuguuuc

SEQ ID NO: 1790 - RNA, 25 nt, Artificial
  Oligonucleotide
cugaauuauuucuuccccaguugca

SEQ ID NO: 1791 - RNA, 24 nt, Artificial
  Oligonucleotide
gaguuucuuccaaagcagccucuc

SEQ ID NO: 1792 - RNA, 25 nt, Artificial
  Oligonucleotide
uuauuucuuccccaguugcauucaa

SEQ ID NO: 1793 - RNA, 24 nt, Artificial
  Oligonucleotide
gaguuucuuccaaagcagccucuc

SEQ ID NO: 1794 - RNA, 21 nt, Artificial
  Oligonucleotide
ucaguuucuucaucuucugau

SEQ ID NO: 1795 - RNA, 21 nt, Artificial
  Oligonucleotide
ucaauuucuucaaauucugau

SEQ ID NO: 1796 - RNA, 23 nt, Artificial
  Oligonucleotide
cuucaguuucuucaucuucugau

SEQ ID NO: 1797 - RNA, 23 nt, Artificial
  Oligonucleotide
ccucaauuucuucaaauucugau

SEQ ID NO: 1798 - RNA, 25 nt, Artificial
  Oligonucleotide
uacuucaguuucuucaucuucugau

SEQ ID NO: 1799 - RNA, 25 nt, Artificial
  Oligonucleotide
ucccucaauuucuucaaauucugau

SEQ ID NO: 1800 - RNA, 19 nt, Artificial
  Oligonucleotide
ucuguagcugccagccauu

SEQ ID NO: 1801 - RNA, 19 nt, Artificial
  Oligonucleotide
uccuuagcuuccagccauu

SEQ ID NO: 1802 - RNA, 23 nt, Artificial
  Oligonucleotide
ucuguagcugccagccauucugu

SEQ ID NO: 1803 - RNA, 23 nt, Artificial
  Oligonucleotide
uccuuagcuuccagccauugugu

SEQ ID NO: 1804 - RNA, 21 nt, Artificial
  Oligonucleotide
ucuuguacugauaccacugau

SEQ ID NO: 1805 - RNA, 22 nt, Artificial
  Oligonucleotide
ucuuguacuucaucccacugau

SEQ ID NO: 1806 - RNA, 20 nt, Artificial
  Oligonucleotide
ucucaggaauuugugucuuu

SEQ ID NO: 1807 - RNA, 20 nt, Artificial
  Oligonucleotide
ucucaggauuuuuuggcugu

SEQ ID NO: 1808 - RNA, 21 nt, Artificial
  Oligonucleotide
cuaccaccaccaugugaguga

SEQ ID NO: 1809 - RNA, 21 nt, Artificial
  Oligonucleotide
cugccaacugcuugucaauga

SEQ ID NO: 1810 - RNA, 21 nt, Artificial
  Oligonucleotide
aguugcgugaucuccacuaga

SEQ ID NO: 1811 - RNA, 22 nt, Artificial
  Oligonucleotide
agcugcguccaccuugucugca

SEQ ID NO: 1812 - RNA, 25 nt, Artificial
  Oligonucleotide
  misc_feature (1)..(1): n is 5-methylcytosine
  misc_feature (6)..(6): n is 2,6-diaminopurine
  misc_feature (7)..(7): n is 2,6-diaminopurine
  misc_feature (12)..(12): n is 5-methylcytosine
  misc_feature (17)..(17): n is 5-methylcytosine
  misc_feature (20)..(20): n is 5-methylcytosine
  misc_feature (24)..(24): n is 2,6-diaminopurine
nugccnnauganuugunuunaggng

SEQ ID NO: 1813 - RNA, 25 nt, Artificial
  Oligonucleotide
  misc_feature (1)..(1): n is 5-methylcytosine
  misc_feature (4)..(4): n is 5-methylcytosine
  misc_feature (5)..(5): n is 5-methylcytosine
  misc_feature (6)..(6): n is 2,6-diaminopurine
  misc_feature (7)..(7): n is 2,6-diaminopurine
  misc_feature (8)..(8): n is 2,6-diaminopurine
  misc_feature (11)..(11): n is 2,6-diaminopurine
  misc_feature (12)..(12): n is 5-methylcytosine
  misc_feature (17)..(17): n is 5-methylcytosine
  misc_feature (20)..(20): n is 5-methylcytosine
  misc_feature (21)..(21): n is 2,6-diaminopurine
  misc_feature (24)..(24): n is 2,6-diaminopurine
nugnnnnnugnnuugunuunnggng

SEQ ID NO: 1814 - RNA, 26 nt, Artificial
  Oligonucleotide
cugagaaguugccuuccuucagaaag

SEQ ID NO: 1815 - RNA, 22 nt, Artificial
  Oligonucleotide
gucugagaaguugccuuccuuc

SEQ ID NO: 1816 - RNA, 22 nt, Artificial
  Oligonucleotide
  misc_feature (6)..(6): n is 2,6-diaminopurine
  misc_feature (8)..(8): n is 2,6-diaminopurine
  misc_feature (9)..(9): n is 2,6-diaminopurine
gucugngnnguugccuuccuuc

SEQ ID NO: 1817 - RNA, 22 nt, Artificial
  Oligonucleotide
  misc_feature (3)..(3): n is 5-methylcytosine
  misc_feature (14)..(14): n is 5-methylcytosine
  misc_feature (19)..(19): n is 5-methylcytosine
  misc_feature (22)..(22): n is 5-methylcytosine
gunugagaaguugncuucnuun

SEQ ID NO: 1818 - RNA, 22 nt, Artificial
  Oligonucleotide
  misc_feature (15)..(15): n is 5-methylcytosine
  misc_feature (18)..(18): n is 5-methylcytosine
gucugagaaguugcnuuncuuc

SEQ ID NO: 1819 - RNA, 22 nt, Artificial
  Oligonucleotide
  misc_feature (3)..(3): n is 5-methylcytosine
  misc_feature (14)..(14): n is 5-methylcytosine
  misc_feature (15)..(15): n is 5-methylcytosine
  misc_feature (18)..(18): n is 5-methylcytosine
  misc_feature (19)..(19): n is 5-methylcytosine
  misc_feature (22)..(22): n is 5-methylcytosine
gunugagaaguugnnuunnuun

SEQ ID NO: 1820 - RNA, 20 nt, Artificial
  Oligonucleotide
cugagaaguugccuuccuuc

SEQ ID NO: 1821 - RNA, 22 nt, Artificial
  Oligonucleotide
cugagaaguugccuuccuuccg

SEQ ID NO: 1822 - RNA, 24 nt, Artificial
  Oligonucleotide
cugagaaguugccuuccuuccgaa

SEQ ID NO: 1823 - RNA, 25 nt, Artificial
  Oligonucleotide
uaagucugagaaguugccuuccuuc

SEQ ID NO: 1824 - RNA, 20 nt, Artificial
  Oligonucleotide
cugccaaaugacuugucuuc

SEQ ID NO: 1825 - RNA, 22 nt, Artificial
  Oligonucleotide
aacugccaaaugacuugucuuc

SEQ ID NO: 1826 - RNA, 21 nt, Artificial
  Oligonucleotide
  misc_feature (6)..(6): n is 2,6-diaminopurine
  misc_feature (8)..(8): n is 2,6-diaminopurine
  misc_feature (9)..(9): n is 2,6-diaminopurine
gucugngnnguugccuuccuu

SEQ ID NO: 1827 - RNA, 21 nt, Artificial
  Oligonucleotide
  misc_feature (2)..(2): n is 2,6-diaminopurine
  misc_feature (3)..(3): n is 5-methylcytosine
  misc_feature (8)..(8): n is 5-methylcytosine
  misc_feature (11)..(11): n is 5-methylcytosine
  misc_feature (12)..(12): n is 2,6-diaminopurine
  misc_feature (15)..(15): n is 2,6-diaminopurine
  misc_feature (17)..(17): n is 5-methylcytosine
  misc_feature (20)..(20): n is 5-methylcytosine
  misc_feature (21)..(21): n is 5-methylcytosine
gnnuugunuunnggngnuunn

SEQ ID NO: 1828 - RNA, 25 nt, Artificial
  Oligonucleotide
  misc_feature (1)..(1): n is 5-methylcytosine
  misc_feature (2)..(2): n is 2,6-diaminopurine
  misc_feature (3)..(3): n is 2,6-diaminopurine
  misc_feature (4)..(4): n is 2,6-diaminopurine
  misc_feature (7)..(7): n is 2,6-diaminopurine
  misc_feature (8)..(8): n is 5-methylcytosine
  misc_feature (13)..(13): n is 5-methylcytosine
  misc_feature (16)..(16): n is 5-methylcytosine
  misc_feature (17)..(17): n is 2,6-diaminopurine
  misc_feature (20)..(20): n is 2,6-diaminopurine
  misc_feature (22)..(22): n is 5-methylcytosine
  misc_feature (25)..(25): n is 5-methylcytosine
nnnnugnnuugunuunnggngnuun

SEQ ID NO: 1829 - RNA, 25 nt, Artificial
  Oligonucleotide
  misc_feature (14)..(14): n is 2,6-diaminopurine
  misc_feature (21)..(21): n is 2,6-diaminopurine
  misc_feature (22)..(22): n is 2,6-diaminopurine
  misc_feature (23)..(23): n is 2,6-diaminopurine
acuugucuucaggngcuuccnnnug

SEQ ID NO: 1830 - RNA, 25 nt, Artificial
  Oligonucleotide
  misc_feature (2)..(2): n is 5-methylcytosine
  misc_feature (7)..(7): n is 5-methylcytosine
  misc_feature (10)..(10): n is 5-methylcytosine
  misc_feature (16)..(16): n is 5-methylcytosine
  misc_feature (19)..(19): n is 5-methylcytosine
  misc_feature (20)..(20): n is 5-methylcytosine
anuugunuunaggagnuunnaaaug

SEQ ID NO: 1831 - RNA, 25 nt, Artificial
  Oligonucleotide
  misc_feature (2)..(2): n is 5-methylcytosine
  misc_feature (7)..(7): n is 5-methylcytosine
  misc_feature (10)..(10): n is 5-methylcytosine
  misc_feature (14)..(14): n is 2,6-diaminopurine
  misc_feature (16)..(16): n is 5-methylcytosine
  misc_feature (19)..(19): n is 5-methylcytosine
  misc_feature (20)..(20): n is 5-methylcytosine
  misc_feature (21)..(21): n is 2,6-diaminopurine
  misc_feature (22)..(22): n is 2,6-diaminopurine
  misc_feature (23)..(23): n is 2,6-diaminopurine
anuugunuunaggngnuunnnnnug

SEQ ID NO: 1832 - RNA, 21 nt, Artificial
  Oligonucleotide
  misc_feature (10)..(10): n is 2,6-diaminopurine
  misc_feature (17)..(17): n is 2,6-diaminopurine
  misc_feature (18)..(18): n is 2,6-diaminopurine
  misc_feature (19)..(19): n is 2,6-diaminopurine
gucuucaggngcuuccnnnug

SEQ ID NO: 1833 - RNA, 17 nt, Artificial
  Oligonucleotide
  misc_feature (1)..(1): n is C or 5-methylcytosine
  misc_feature (2)..(2): n is U or 5-methyluracil
  misc_feature (3)..(3): n is U or 5-methyluracil
  misc_feature (4)..(4): n is C or 5-methylcytosine
  misc_feature (5)..(5): n is U or 5-methyluracil
  misc_feature (6)..(6): n is A or 2,6-diaminopurine
  misc_feature (7)..(7): n is A or 2,6-diaminopurine
  misc_feature (8)..(8): n is A or 2,6-diaminopurine
  misc_feature (10)..(10): n is C or 5-methylcytosine
  misc_feature (11)..(11): n is U or 5-methyluracil
  misc_feature (13)..(13): n is U or 5-methyluracil
  misc_feature (14)..(14): n is U or 5-methyluracil
  misc_feature (15)..(15): n is U or 5-methyluracil
  misc_feature (17)..(17): n is A or 2,6-diaminopurine
nnnnnnnngnngnnngn

SEQ ID NO: 1834 - RNA, 17 nt, Artificial
  Oligonucleotide
  misc_feature (1)..(1): n is 5-methylcytosine
  misc_feature (4)..(4): n is 5-methylcytosine
  misc_feature (10)..(10): n is 5-methylcytosine
nuunuaaagnuguuuga

SEQ ID NO: 1835 - RNA, 17 nt, Artificial
  Oligonucleotide
  misc_feature (6)..(6): n is 2,6-diaminopurine
  misc_feature (7)..(7): n is 2,6-diaminopurine
  misc_feature (8)..(8): n is 2,6-diaminopurine
  misc_feature (17)..(17): n is 2,6-diaminopurine
cuucunnngcuguuugn

SEQ ID NO: 1836 - RNA, 21 nt, Artificial
  Oligonucleotide
  misc_feature (1)..(1): n is A or 2,6-diaminopurine
  misc_feature (2)..(2): n is U or 5-methyluracil
  misc_feature (3)..(3): n is A or 2,6-diaminopurine
  misc_feature (4)..(4): n is A or 2,6-diaminopurine
  misc_feature (6)..(6): n is C or 5-methylcytosine
  misc_feature (7)..(7): n is U or 5-methyluracil
  misc_feature (9)..(9): n is C or 5-methylcytosine
  misc_feature (10)..(10): n is C or 5-methylcytosine
  misc_feature (11)..(11): n is A or 2,6-diaminopurine
  misc_feature (12)..(12): n is A or 2,6-diaminopurine
  misc_feature (13)..(13): n is C or 5-methylcytosine
  misc_feature (14)..(14): n is U or 5-methyluracil
  misc_feature (16)..(16): n is C or 5-methylcytosine
  misc_feature (17)..(17): n is U or 5-methyluracil
  misc_feature (18)..(18): n is U or 5-methyluracil
  misc_feature (20)..(20): n is U or 5-methyluracil
  misc_feature (21)..(21): n is C or 5-methylcytosine
nnnngnngnnnnnngnnngnn

SEQ ID NO: 1837 - RNA, 25 nt, Artificial
  Oligonucleotide
  misc_feature (1)..(1): n is A or 2,6-diaminopurine
  misc_feature (2)..(2): n is U or 5-methyluracil
  misc_feature (3)..(3): n is U or 5-methyluracil
  misc_feature (4)..(4): n is U or 5-methyluracil
  misc_feature (6)..(6): n is A or 2,6-diaminopurine
  misc_feature (8)..(8): n is C or 5-methylcytosine
  misc_feature (9)..(9): n is U or 5-methyluracil
  misc_feature (11)..(11): n is C or 5-methylcytosine
  misc_feature (13)..(13): n is U or 5-methyluracil
  misc_feature (14)..(14): n is C or 5-methylcytosine
  misc_feature (15)..(15): n is C or 5-methylcytosine
  misc_feature (16)..(16): n is A or 2,6-diaminopurine
  misc_feature (17)..(17): n is C or 5-methylcytosine
  misc_feature (18)..(18): n is C or 5-methylcytosine
  misc_feature (19)..(19): n is U or 5-methyluracil
  misc_feature (20)..(20): n is U or 5-methyluracil
  misc_feature (22)..(22): n is U or 5-methyluracil
  misc_feature (23)..(23): n is C or 5-methylcytosine
  misc_feature (24)..(24): n is U or 5-methyluracil
nnnngngnngngnnnnnnnngnnng

SEQ ID NO: 1838 - RNA, 25 nt, Artificial
  Oligonucleotide
  misc_feature (1)..(1): n is C or 5-methylcytosine
  misc_feature (2)..(2): n is U or 5-methyluracil
  misc_feature (6)..(6): n is C or 5-methylcytosine
  misc_feature (7)..(7): n is U or 5-methyluracil
  misc_feature (8)..(8): n is U or 5-methyluracil
  misc_feature (9)..(9): n is C or 5-methylcytosine
  misc_feature (10)..(10): n is C or 5-methylcytosine
  misc_feature (11)..(11): n is U or 5-methyluracil
  misc_feature (13)..(13): n is A or 2,6-diaminopurine
  misc_feature (16)..(16): n is C or 5-methylcytosine
  misc_feature (17)..(17): n is A or 2,6-diaminopurine
  misc_feature (18)..(18): n is U or 5-methyluracil
  misc_feature (19)..(19): n is U or 5-methyluracil
  misc_feature (20)..(20): n is U or 5-methyluracil
  misc_feature (22)..(22): n is A or 2,6-diaminopurine
  misc_feature (24)..(24): n is C or 5-methylcytosine
  misc_feature (25)..(25): n is U or 5-methyluracil
nngggnnnnnngnggnnnnngngnn

SEQ ID NO: 1839 - RNA, 26 nt, Artificial
  Oligonucleotide
  misc_feature (2)..(2): n is 2,6-diaminopurine
  misc_feature (14)..(14): n is 2,6-diaminopurine
  misc_feature (16)..(16): n is 2,6-diaminopurine
  misc_feature (21)..(21): n is 2,6-diaminopurine
cngucuccugggcngncuggnugcuc

SEQ ID NO: 1840 - RNA, 26 nt, Artificial
  Oligonucleotide
  misc_feature (14)..(14): n is 2,6-diaminopurine
  misc_feature (16)..(16): n is 2,6-diaminopurine
cagucuccugggcngncuggaugcuc

SEQ ID NO: 1841 - RNA, 26 nt, Artificial
  Oligonucleotide
  misc_feature (2)..(2): n is 2,6-diaminopurine
  misc_feature (21)..(21): n is 2,6-diaminopurine
cngucuccugggcagacuggnugcuc

SEQ ID NO: 1842 - RNA, 26 nt, Artificial
  Oligonucleotide
  misc_feature (1)..(1): n is 5-methylcytosine
  misc_feature (5)..(5): n is 5-methylcytosine
  misc_feature (7)..(7): n is 5-methylcytosine
  misc_feature (8)..(8): n is 5-methylcytosine
  misc_feature (13)..(13): n is 5-methylcytosine
  misc_feature (17)..(17): n is 5-methylcytosine
  misc_feature (24)..(24): n is 5-methylcytosine
  misc_feature (26)..(26): n is 5-methylcytosine
nagununnugggnaganuggaugnun

SEQ ID NO: 1843 - RNA, 26 nt, Artificial
  Oligonucleotide
  misc_feature (1)..(1): n is 5-methylcytosine
  misc_feature (2)..(2): n is 2,6-diaminopurine
  misc_feature (5)..(5): n is 5-methylcytosine
  misc_feature (7)..(7): n is 5-methylcytosine
  misc_feature (8)..(8): n is 5-methylcytosine
  misc_feature (13)..(13): n is 5-methylcytosine
  misc_feature (14)..(14): n is 2,6-diaminopurine
  misc_feature (16)..(16): n is 2,6-diaminopurine
  misc_feature (17)..(17): n is 5-methylcytosine
  misc_feature (21)..(21): n is 2,6-diaminopurine
  misc_feature (24)..(24): n is 5-methylcytosine
  misc_feature (26)..(26): n is 5-methylcytosine
nngununnugggnngnnuggnugnun

SEQ ID NO: 1844 - RNA, 26 nt, Artificial
  Oligonucleotide
cagucuccugggcagacuggaugcuc

SEQ ID NO: 1845 - RNA, 24 nt, Artificial
  Oligonucleotide
gucuccugggcagacuggaugcuc

SEQ ID NO: 1846 - RNA, 24 nt, Artificial
  Oligonucleotide
  misc_feature (2)..(2): n is U or 5-methyluracil
  misc_feature (3)..(3): n is C or 5-methylcytosine
  misc_feature (4)..(4): n is U or 5-methyluracil
  misc_feature (5)..(5): n is C or 5-methylcytosine
  misc_feature (6)..(6): n is C or 5-methylcytosine
  misc_feature (7)..(7): n is U or 5-methyluracil
  misc_feature (11)..(11): n is C or 5-methylcytosine
  misc_feature (12)..(12): n is A or 2,6-diaminopurine
  misc_feature (14)..(14): n is A or 2,6-diaminopurine
  misc_feature (15)..(15): n is C or 5-methylcytosine
  misc_feature (16)..(16): n is U or 5-methyluracil
  misc_feature (19)..(19): n is A or 2,6-diaminopurine
  misc_feature (20)..(20): n is U or 5-methyluracil
  misc_feature (22)..(22): n is C or 5-methylcytosine
  misc_feature (23)..(23): n is U or 5-methyluracil
  misc_feature (24)..(24): n is C or 5-methylcytosine
gnnnnnngggnngnnnggnngnnn

SEQ ID NO: 1847 - RNA, 24 nt, Artificial
  Oligonucleotide
cagucuccugggcagacuggaugc

SEQ ID NO: 1848 - RNA, 24 nt, Artificial
  Oligonucleotide
  misc_feature (1)..(1): n is C or 5-methylcytosine
  misc_feature (2)..(2): n is A or 2,6-diaminopurine
  misc_feature (4)..(4): n is U or 5-methyluracil
  misc_feature (5)..(5): n is C or 5-methylcytosine
  misc_feature (6)..(6): n is U or 5-methyluracil
  misc_feature (7)..(7): n is C or 5-methylcytosine
  misc_feature (8)..(8): n is C or 5-methylcytosine
  misc_feature (9)..(9): n is U or 5-methyluracil
  misc_feature (13)..(13): n is C or 5-methylcytosine
  misc_feature (14)..(14): n is A or 2,6-diaminopurine
  misc_feature (16)..(16): n is A or 2,6-diaminopurine
  misc_feature (17)..(17): n is C or 5-methylcytosine
  misc_feature (18)..(18): n is U or 5-methyluracil
  misc_feature (21)..(21): n is A or 2,6-diaminopurine
  misc_feature (22)..(22): n is U or 5-methyluracil
  misc_feature (24)..(24): n is C or 5-methylcytosine
nngnnnnnngggnngnnnggnngn

SEQ ID NO: 1849 - RNA, 22 nt, Artificial
  Oligonucleotide
gucuccugggcagacuggaugc

SEQ ID NO: 1850 - RNA, 22 nt, Artificial
  Oligonucleotide
  misc_feature (2)..(2): n is U or 5-methyluracil
  misc_feature (3)..(3): n is C or 5-methylcytosine
  misc_feature (4)..(4): n is U or 5-methyluracil
  misc_feature (5)..(5): n is C or 5-methylcytosine
  misc_feature (6)..(6): n is C or 5-methylcytosine
  misc_feature (7)..(7): n is U or 5-methyluracil
  misc_feature (11)..(11): n is C or 5-methylcytosine
  misc_feature (12)..(12): n is A or 2,6-diaminopurine
  misc_feature (14)..(14): n is A or 2,6-diaminopurine
  misc_feature (15)..(15): n is C or 5-methylcytosine
  misc_feature (16)..(16): n is U or 5-methyluracil
  misc_feature (19)..(19): n is A or 2,6-diaminopurine
  misc_feature (20)..(20): n is U or 5-methyluracil
  misc_feature (22)..(22): n is C or 5-methylcytosine
gnnnnnngggnngnnnggnngn

SEQ ID NO: 1851 - RNA, 26 nt, Artificial
  Oligonucleotide
  misc_feature (2)..(2): n is A or 2,6-diaminopurine
  misc_feature (4)..(4): n is U or 5-methyluracil
  misc_feature (7)..(7): n is U or 5-methyluracil
  misc_feature (10)..(10): n is A or 2,6-diaminopurine
  misc_feature (11)..(11): n is U or 5-methyluracil
  misc_feature (12)..(12): n is U or 5-methyluracil
  misc_feature (13)..(13): n is A or 2,6-diaminopurine
  misc_feature (14)..(14): n is A or 2,6-diaminopurine
  misc_feature (16)..(16): n is U or 5-methyluracil
  misc_feature (18)..(18): n is U or 5-methyluracil
  misc_feature (19)..(19): n is A or 2,6-diaminopurine
  misc_feature (20)..(20): n is A or 2,6-diaminopurine
  misc_feature (23)..(23): n is A or 2,6-diaminopurine
  misc_feature (24)..(24): n is U or 5-methyluracil
  misc_feature (25)..(25): n is U or 5-methyluracil
  misc_feature (26)..(26): n is U or 5-methyluracil
gncnccnggnnnnngngnnnggnnnn

SEQ ID NO: 1852 - RNA, 24 nt, Artificial
  Oligonucleotide
  misc_feature (1)..(1): n is C or 5-methylcytosine
  misc_feature (2)..(2): n is A or 2,6-diaminopurine
  misc_feature (3)..(3): n is U or 5-methyluracil
  misc_feature (4)..(4): n is C or 5-methylcytosine
  misc_feature (5)..(5): n is C or 5-methylcytosine
  misc_feature (6)..(6): n is U or 5-methyluracil
  misc_feature (8)..(8): n is U or 5-methyluracil
  misc_feature (9)..(9): n is A or 2,6-diaminopurine
  misc_feature (12)..(12): n is A or 2,6-diaminopurine
  misc_feature (13)..(13): n is C or 5-methylcytosine
  misc_feature (14)..(14): n is A or 2,6-diaminopurine
  misc_feature (15)..(15): n is U or 5-methyluracil
  misc_feature (16)..(16): n is U or 5-methyluracil
  misc_feature (19)..(19): n is C or 5-methylcytosine
  misc_feature (20)..(20): n is A or 2,6-diaminopurine
  misc_feature (22)..(22): n is U or 5-methyluracil
  misc_feature (23)..(23): n is U or 5-methyluracil
nnnnnngnnggnnnnnggnngnng

SEQ ID NO: 1853 - RNA, 24 nt, Artificial
  Oligonucleotide
  misc_feature (1)..(1): n is C or 5-methylcytosine
  misc_feature (2)..(2): n is U or 5-methyluracil
  misc_feature (4)..(4): n is U or 5-methyluracil
  misc_feature (5)..(5): n is A or 2,6-diaminopurine
  misc_feature (8)..(8): n is A or 2,6-diaminopurine
  misc_feature (9)..(9): n is C or 5-methylcytosine
  misc_feature (10)..(10): n is A or 2,6-diaminopurine
  misc_feature (11)..(11): n is U or 5-methyluracil
  misc_feature (12)..(12): n is U or 5-methyluracil
  misc_feature (15)..(15): n is C or 5-methylcytosine
  misc_feature (16)..(16): n is A or 2,6-diaminopurine
  misc_feature (18)..(18): n is U or 5-methyluracil
  misc_feature (19)..(19): n is U or 5-methyluracil
  misc_feature (21)..(21): n is U or 5-methyluracil
  misc_feature (22)..(22): n is U or 5-methyluracil
  misc_feature (23)..(23): n is U or 5-methyluracil
  misc_feature (24)..(24): n is C or 5-methylcytosine
nngnnggnnnnnggnngnngnnnn

SEQ ID NO: 1854 - RNA, 25 nt, Artificial
  Oligonucleotide
  misc_feature (1)..(1): n is C or 5-methylcytosine
  misc_feature (2)..(2): n is U or 5-methyluracil
  misc_feature (4)..(4): n is A or 2,6-diaminopurine
  misc_feature (5)..(5): n is A or 2,6-diaminopurine
  misc_feature (6)..(6): n is U or 5-methyluracil
  misc_feature (7)..(7): n is U or 5-methyluracil
  misc_feature (8)..(8): n is A or 2,6-diaminopurine
  misc_feature (9)..(9): n is U or 5-methyluracil
  misc_feature (10)..(10): n is U or 5-methyluracil
  misc_feature (11)..(11): n is U or 5-methyluracil
  misc_feature (12)..(12): n is C or 5-methylcytosine
  misc_feature (13)..(13): n is U or 5-methyluracil
  misc_feature (14)..(14): n is U or 5-methyluracil
  misc_feature (15)..(15): n is C or 5-methylcytosine
  misc_feature (16)..(16): n is C or 5-methylcytosine
  misc_feature (17)..(17): n is C or 5-methylcytosine
  misc_feature (18)..(18): n is C or 5-methylcytosine
  misc_feature (19)..(19): n is A or 2,6-diaminopurine
  misc_feature (21)..(21): n is U or 5-methyluracil
  misc_feature (22)..(22): n is U or 5-methyluracil
  misc_feature (24)..(24): n is C or 5-methylcytosine
  misc_feature (25)..(25): n is A or 2,6-diaminopurine
nngnnnnnnnnnnnnnnnngnngnn

SEQ ID NO: 1855 - RNA, 25 nt, Artificial
  Oligonucleotide
  misc_feature (1)..(1): n is U or 5-methyluracil
  misc_feature (2)..(2): n is U or 5-methyluracil
  misc_feature (3)..(3): n is A or 2,6-diaminopurine
  misc_feature (4)..(4): n is U or 5-methyluracil
  misc_feature (5)..(5): n is U or 5-methyluracil
  misc_feature (6)..(6): n is U or 5-methyluracil
  misc_feature (7)..(7): n is C or 5-methylcytosine
  misc_feature (8)..(8): n is U or 5-methyluracil
  misc_feature (9)..(9): n is U or 5-methyluracil
  misc_feature (10)..(10): n is C or 5-methylcytosine
  misc_feature (11)..(11): n is C or 5-methylcytosine
  misc_feature (12)..(12): n is C or 5-methylcytosine
  misc_feature (13)..(13): n is C or 5-methylcytosine
  misc_feature (14)..(14): n is A or 2,6-diaminopurine
  misc_feature (16)..(16): n is U or 5-methyluracil
  misc_feature (17)..(17): n is U or 5-methyluracil
  misc_feature (19)..(19): n is C or 5-methylcytosine
  misc_feature (20)..(20): n is A or 2,6-diaminopurine
  misc_feature (21)..(21): n is U or 5-methyluracil
  misc_feature (22)..(22): n is U or 5-methyluracil
  misc_feature (23)..(23): n is C or 5-methylcytosine
  misc_feature (24)..(24): n is A or 2,6-diaminopurine
  misc_feature (25)..(25): n is A or 2,6-diaminopurine
nnnnnnnnnnnnnngnngnnnnnnn

SEQ ID NO: 1856 - RNA, 23 nt, Artificial
  Oligonucleotide
ugagagaauugacccugacuugu

SEQ ID NO: 1857 - RNA, 26 nt, Artificial
  Oligonucleotide
accaugugagugagagaauugacccu

SEQ ID NO: 1858 - RNA, 21 nt, Artificial
  Oligonucleotide
caccaccaugugagugagaga

SEQ ID NO: 1859 - RNA, 22 nt, Artificial
  Oligonucleotide
cuccacuagauucaucaacuac

SEQ ID NO: 1860 - RNA, 23 nt, Artificial
  Oligonucleotide
ucuuccaaagcagcaguugcgug

SEQ ID NO: 1861 - RNA, 21 nt, Artificial
  Oligonucleotide
  misc_feature (1)..(1): n is U or 5-methyluracil
  misc_feature (2)..(2): n is C or 5-methylcytosine
  misc_feature (3)..(3): n is A or 2,6-diaminopurine
  misc_feature (5)..(5): n is U or 5-methyluracil
  misc_feature (6)..(6): n is U or 5-methyluracil
  misc_feature (7)..(7): n is U or 5-methyluracil
  misc_feature (8)..(8): n is C or 5-methylcytosine
  misc_feature (9)..(9): n is U or 5-methyluracil
  misc_feature (10)..(10): n is U or 5-methyluracil
  misc_feature (11)..(11): n is C or 5-methylcytosine
  misc_feature (12)..(12): n is A or 2,6-diaminopurine
  misc_feature (13)..(13): n is U or 5-methyluracil
  misc_feature (14)..(14): n is C or 5-methylcytosine
  misc_feature (15)..(15): n is U or 5-methyluracil
  misc_feature (16)..(16): n is U or 5-methyluracil
  misc_feature (17)..(17): n is C or 5-methylcytosine
  misc_feature (18)..(18): n is U or 5-methyluracil
  misc_feature (20)..(20): n is A or 2,6-diaminopurine
  misc_feature (21)..(21): n is U or 5-methyluracil
nnngnnnnnnnnnnnnnngnn

SEQ ID NO: 1862 - RNA, 21 nt, Artificial
  Oligonucleotide
  misc_feature (1)..(1): n is U or 5-methyluracil
  misc_feature (2)..(2): n is C or 5-methylcytosine
  misc_feature (3)..(3): n is A or 2,6-diaminopurine
  misc_feature (4)..(4): n is A or 2,6-diaminopurine
  misc_feature (5)..(5): n is U or 5-methyluracil
  misc_feature (6)..(6): n is U or 5-methyluracil
  misc_feature (7)..(7): n is U or 5-methyluracil
  misc_feature (8)..(8): n is C or 5-methylcytosine
  misc_feature (9)..(9): n is U or 5-methyluracil
  misc_feature (10)..(10): n is U or 5-methyluracil
  misc_feature (11)..(11): n is C or 5-methylcytosine
  misc_feature (12)..(12): n is A or 2,6-diaminopurine
  misc_feature (13)..(13): n is A or 2,6-diaminopurine
  misc_feature (14)..(14): n is A or 2,6-diaminopurine
  misc_feature (15)..(15): n is U or 5-methyluracil
  misc_feature (16)..(16): n is U or 5-methyluracil
  misc_feature (17)..(17): n is C or 5-methylcytosine
  misc_feature (18)..(18): n is U or 5-methyluracil
  misc_feature (20)..(20): n is A or 2,6-diaminopurine
  misc_feature (21)..(21): n is U or 5-methyluracil
nnnnnnnnnnnnnnnnnngnn

SEQ ID NO: 1863 - RNA, 23 nt, Artificial
  Oligonucleotide
  misc_feature (1)..(1): n is C or 5-methylcytosine
  misc_feature (2)..(2): n is U or 5-methyluracil
  misc_feature (3)..(3): n is U or 5-methyluracil
  misc_feature (4)..(4): n is C or 5-methylcytosine
  misc_feature (5)..(5): n is A or 2,6-diaminopurine
  misc_feature (7)..(7): n is U or 5-methyluracil
  misc_feature (8)..(8): n is U or 5-methyluracil
  misc_feature (9)..(9): n is U or 5-methyluracil
  misc_feature (10)..(10): n is C or 5-methylcytosine
  misc_feature (11)..(11): n is U or 5-methyluracil
  misc_feature (12)..(12): n is U or 5-methyluracil
  misc_feature (13)..(13): n is C or 5-methylcytosine
  misc_feature (14)..(14): n is A or 2,6-diaminopurine
  misc_feature (15)..(15): n is U or 5-methyluracil
  misc_feature (16)..(16): n is C or 5-methylcytosine
  misc_feature (17)..(17): n is U or 5-methyluracil
  misc_feature (18)..(18): n is U or 5-methyluracil
  misc_feature (19)..(19): n is C or 5-methylcytosine
  misc_feature (20)..(20): n is U or 5-methyluracil
  misc_feature (22)..(22): n is A or 2,6-diaminopurine
  misc_feature (23)..(23): n is U or 5-methyluracil
nnnnngnnnnnnnnnnnnnngnn

SEQ ID NO: 1864 - RNA, 23 nt, Artificial
  Oligonucleotide
  misc_feature (1)..(1): n is C or 5-methylcytosine
  misc_feature (2)..(2): n is C or 5-methylcytosine
  misc_feature (3)..(3): n is U or 5-methyluracil
  misc_feature (4)..(4): n is C or 5-methylcytosine
  misc_feature (5)..(5): n is A or 2,6-diaminopurine
  misc_feature (6)..(6): n is A or 2,6-diaminopurine
  misc_feature (7)..(7): n is U or 5-methyluracil
  misc_feature (8)..(8): n is U or 5-methyluracil
  misc_feature (9)..(9): n is U or 5-methyluracil
  misc_feature (10)..(10): n is C or 5-methylcytosine
  misc_feature (11)..(11): n is U or 5-methyluracil
  misc_feature (12)..(12): n is U or 5-methyluracil
  misc_feature (13)..(13): n is C or 5-methylcytosine
  misc_feature (14)..(14): n is A or 2,6-diaminopurine
  misc_feature (15)..(15): n is A or 2,6-diaminopurine
  misc_feature (16)..(16): n is A or 2,6-diaminopurine
  misc_feature (17)..(17): n is U or 5-methyluracil
  misc_feature (18)..(18): n is U or 5-methyluracil
  misc_feature (19)..(19): n is C or 5-methylcytosine
  misc_feature (20)..(20): n is U or 5-methyluracil
  misc_feature (22)..(22): n is A or 2,6-diaminopurine
  misc_feature (23)..(23): n is U or 5-methyluracil
nnnnnnnnnnnnnnnnnnnngnn

SEQ ID NO: 1865 - RNA, 25 nt, Artificial
  Oligonucleotide
  misc_feature (1)..(1): n is U or 5-methyluracil
  misc_feature (2)..(2): n is A or 2,6-diaminopurine
  misc_feature (3)..(3): n is C or 5-methylcytosine
  misc_feature (4)..(4): n is U or 5-methyluracil
  misc_feature (5)..(5): n is U or 5-methyluracil
  misc_feature (6)..(6): n is C or 5-methylcytosine
  misc_feature (7)..(7): n is A or 2,6-diaminopurine
  misc_feature (9)..(9): n is U or 5-methyluracil
  misc_feature (10)..(10): n is U or 5-methyluracil
  misc_feature (11)..(11): n is U or 5-methyluracil
  misc_feature (12)..(12): n is C or 5-methylcytosine
  misc_feature (13)..(13): n is U or 5-methyluracil
  misc_feature (14)..(14): n is U or 5-methyluracil
  misc_feature (15)..(15): n is C or 5-methylcytosine
  misc_feature (16)..(16): n is A or 2,6-diaminopurine
  misc_feature (17)..(17): n is U or 5-methyluracil
  misc_feature (18)..(18): n is C or 5-methylcytosine
  misc_feature (19)..(19): n is U or 5-methyluracil
  misc_feature (20)..(20): n is U or 5-methyluracil
  misc_feature (21)..(21): n is C or 5-methylcytosine
  misc_feature (22)..(22): n is U or 5-methyluracil
  misc_feature (24)..(24): n is A or 2,6-diaminopurine
  misc_feature (25)..(25): n is U or 5-methyluracil
nnnnnnngnnnnnnnnnnnnnngnn

SEQ ID NO: 1866 - RNA, 25 nt, Artificial
  Oligonucleotide
  misc_feature (1)..(1): n is U or 5-methyluracil
  misc_feature (2)..(2): n is C or 5-methylcytosine
  misc_feature (3)..(3): n is C or 5-methylcytosine
  misc_feature (4)..(4): n is C or 5-methylcytosine
  misc_feature (5)..(5): n is U or 5-methyluracil
  misc_feature (6)..(6): n is C or 5-methylcytosine
  misc_feature (7)..(7): n is A or 2,6-diaminopurine
  misc_feature (8)..(8): n is A or 2,6-diaminopurine
  misc_feature (9)..(9): n is U or 5-methyluracil
  misc_feature (10)..(10): n is U or 5-methyluracil
  misc_feature (11)..(11): n is U or 5-methyluracil
  misc_feature (12)..(12): n is C or 5-methylcytosine
  misc_feature (13)..(13): n is U or 5-methyluracil
  misc_feature (14)..(14): n is U or 5-methyluracil
  misc_feature (15)..(15): n is C or 5-methylcytosine
  misc_feature (16)..(16): n is A or 2,6-diaminopurine
  misc_feature (17)..(17): n is A or 2,6-diaminopurine
  misc_feature (18)..(18): n is A or 2,6-diaminopurine
  misc_feature (19)..(19): n is U or 5-methyluracil
  misc_feature (20)..(20): n is U or 5-methyluracil
  misc_feature (21)..(21): n is C or 5-methylcytosine
  misc_feature (22)..(22): n is U or 5-methyluracil
  misc_feature (24)..(24): n is A or 2,6-diaminopurine
  misc_feature (25)..(25): n is U or 5-methyluracil
nnnnnnnnnnnnnnnnnnnnnngnn

SEQ ID NO: 1867 - RNA, 21 nt, Artificial
  Oligonucleotide
  misc_feature (1)..(1): n is C or 5-methylcytosine
  misc_feature (2)..(2): n is U or 5-methyluracil
  misc_feature (3)..(3): n is A or 2,6-diaminopurine
  misc_feature (4)..(4): n is C or 5-methylcytosine
  misc_feature (5)..(5): n is C or 5-methylcytosine
  misc_feature (6)..(6): n is A or 2,6-diaminopurine
  misc_feature (7)..(7): n is C or 5-methylcytosine
  misc_feature (8)..(8): n is C or 5-methylcytosine
  misc_feature (9)..(9): n is A or 2,6-diaminopurine
  misc_feature (10)..(10): n is C or 5-methylcytosine
  misc_feature (11)..(11): n is C or 5-methylcytosine
  misc_feature (12)..(12): n is A or 2,6-diaminopurine
  misc_feature (13)..(13): n is U or 5-methyluracil
  misc_feature (15)..(15): n is U or 5-methyluracil
  misc_feature (17)..(17): n is A or 2,6-diaminopurine
  misc_feature (19)..(19): n is U or 5-methyluracil
  misc_feature (21)..(21): n is A or 2,6-diaminopurine
nnnnnnnnnnnnngngngngn

SEQ ID NO: 1868 - RNA, 21 nt, Artificial
  Oligonucleotide
  misc_feature (1)..(1): n is C or 5-methylcytosine
  misc_feature (2)..(2): n is U or 5-methyluracil
  misc_feature (4)..(4): n is C or 5-methylcytosine
  misc_feature (5)..(5): n is C or 5-methylcytosine
  misc_feature (6)..(6): n is A or 2,6-diaminopurine
  misc_feature (7)..(7): n is A or 2,6-diaminopurine
  misc_feature (8)..(8): n is C or 5-methylcytosine
  misc_feature (9)..(9): n is U or 5-methyluracil
  misc_feature (11)..(11): n is C or 5-methylcytosine
  misc_feature (12)..(12): n is U or 5-methyluracil
  misc_feature (13)..(13): n is U or 5-methyluracil
  misc_feature (15)..(15): n is U or 5-methyluracil
  misc_feature (16)..(16): n is C or 5-methylcytosine
  misc_feature (17)..(17): n is A or 2,6-diaminopurine
  misc_feature (18)..(18): n is A or 2,6-diaminopurine
  misc_feature (19)..(19): n is U or 5-methyluracil
  misc_feature (21)..(21): n is A or 2,6-diaminopurine
nngnnnnnngnnngnnnnngn

SEQ ID NO: 1869 - RNA, 21 nt, Artificial
  Oligonucleotide
  misc_feature (1)..(1): n is A or 2,6-diaminopurine
  misc_feature (3)..(3): n is U or 5-methyluracil
  misc_feature (4)..(4): n is U or 5-methyluracil
  misc_feature (6)..(6): n is C or 5-methylcytosine
  misc_feature (8)..(8): n is U or 5-methyluracil
  misc_feature (10)..(10): n is A or 2,6-diaminopurine
  misc_feature (11)..(11): n is U or 5-methyluracil
  misc_feature (12)..(12): n is C or 5-methylcytosine
  misc_feature (13)..(13): n is U or 5-methyluracil
  misc_feature (14)..(14): n is C or 5-methylcytosine
  misc_feature (15)..(15): n is C or 5-methylcytosine
  misc_feature (16)..(16): n is A or 2,6-diaminopurine
  misc_feature (17)..(17): n is C or 5-methylcytosine
  misc_feature (18)..(18): n is U or 5-methyluracil
  misc_feature (19)..(19): n is A or 2,6-diaminopurine
  misc_feature (21)..(21): n is A or 2,6-diaminopurine
ngnngngngnnnnnnnnnngn

SEQ ID NO: 1870 - RNA, 22 nt, Artificial
  Oligonucleotide
  misc_feature (1)..(1): n is A or 2,6-diaminopurine
  misc_feature (3)..(3): n is C or 5-methylcytosine
  misc_feature (4)..(4): n is U or 5-methyluracil
  misc_feature (6)..(6): n is C or 5-methylcytosine
  misc_feature (8)..(8): n is U or 5-methyluracil
  misc_feature (9)..(9): n is C or 5-methylcytosine
  misc_feature (10)..(10): n is C or 5-methylcytosine
  misc_feature (11)..(11): n is A or 2,6-diaminopurine
  misc_feature (12)..(12): n is C or 5-methylcytosine
  misc_feature (13)..(13): n is C or 5-methylcytosine
  misc_feature (14)..(14): n is U or 5-methyluracil
  misc_feature (15)..(15): n is U or 5-methyluracil
  misc_feature (17)..(17): n is U or 5-methyluracil
  misc_feature (18)..(18): n is C or 5-methylcytosine
  misc_feature (19)..(19): n is U or 5-methyluracil
  misc_feature (21)..(21): n is C or 5-methylcytosine
  misc_feature (22)..(22): n is A or 2,6-diaminopurine
ngnngngnnnnnnnngnnngnn

SEQ ID NO: 1871 - RNA, 23 nt, Artificial
  Oligonucleotide
  misc_feature (1)..(1): n is U or 5-methyluracil
  misc_feature (3)..(3): n is A or 2,6-diaminopurine
  misc_feature (5)..(5): n is A or 2,6-diaminopurine
  misc_feature (7)..(7): n is A or 2,6-diaminopurine
  misc_feature (8)..(8): n is A or 2,6-diaminopurine
  misc_feature (9)..(9): n is U or 5-methyluracil
  misc_feature (10)..(10): n is U or 5-methyluracil
  misc_feature (12)..(12): n is A or 2,6-diaminopurine
  misc_feature (13)..(13): n is C or 5-methylcytosine
  misc_feature (14)..(14): n is C or 5-methylcytosine
  misc_feature (15)..(15): n is C or 5-methylcytosine
  misc_feature (16)..(16): n is U or 5-methyluracil
  misc_feature (18)..(18): n is A or 2,6-diaminopurine
  misc_feature (19)..(19): n is C or 5-methylcytosine
  misc_feature (20)..(20): n is U or 5-methyluracil
  misc_feature (21)..(21): n is U or 5-methyluracil
  misc_feature (23)..(23): n is U or 5-methyluracil
ngngngnnnngnnnnngnnnngn

SEQ ID NO: 1872 - RNA, 26 nt, Artificial
  Oligonucleotide
  misc_feature (1)..(1): n is A or 2,6-diaminopurine
  misc_feature (2)..(2): n is C or 5-methylcytosine
  misc_feature (3)..(3): n is C or 5-methylcytosine
  misc_feature (4)..(4): n is A or 2,6-diaminopurine
  misc_feature (5)..(5): n is U or 5-methyluracil
  misc_feature (7)..(7): n is U or 5-methyluracil
  misc_feature (9)..(9): n is A or 2,6-diaminopurine
  misc_feature (11)..(11): n is U or 5-methyluracil
  misc_feature (13)..(13): n is A or 2,6-diaminopurine
  misc_feature (15)..(15): n is A or 2,6-diaminopurine
  misc_feature (17)..(17): n is A or 2,6-diaminopurine
  misc_feature (18)..(18): n is A or 2,6-diaminopurine
  misc_feature (19)..(19): n is U or 5-methyluracil
  misc_feature (20)..(20): n is U or 5-methyluracil
  misc_feature (22)..(22): n is A or 2,6-diaminopurine
  misc_feature (23)..(23): n is C or 5-methylcytosine
  misc_feature (24)..(24): n is C or 5-methylcytosine
  misc_feature (25)..(25): n is C or 5-methylcytosine
  misc_feature (26)..(26): n is U or 5-methyluracil
nnnnngngngngngngnnnngnnnnn

SEQ ID NO: 1873 - RNA, 21 nt, Artificial
  Oligonucleotide
  misc_feature (1)..(1): n is C or 5-methylcytosine
  misc_feature (2)..(2): n is A or 2,6-diaminopurine
  misc_feature (3)..(3): n is C or 5-methylcytosine
  misc_feature (4)..(4): n is C or 5-methylcytosine
  misc_feature (5)..(5): n is A or 2,6-diaminopurine
  misc_feature (6)..(6): n is C or 5-methylcytosine
  misc_feature (7)..(7): n is C or 5-methylcytosine
  misc_feature (8)..(8): n is A or 2,6-diaminopurine
  misc_feature (9)..(9): n is U or 5-methyluracil
  misc_feature (11)..(11): n is U or 5-methyluracil
  misc_feature (13)..(13): n is A or 2,6-diaminopurine
  misc_feature (15)..(15): n is U or 5-methyluracil
  misc_feature (17)..(17): n is A or 2,6-diaminopurine
  misc_feature (19)..(19): n is A or 2,6-diaminopurine
  misc_feature (21)..(21): n is A or 2,6-diaminopurine
nnnnnnnnngngngngngngn

SEQ ID NO: 1874 - RNA, 22 nt, Artificial
  Oligonucleotide
  misc_feature (1)..(1): n is C or 5-methylcytosine
  misc_feature (2)..(2): n is U or 5-methyluracil
  misc_feature (3)..(3): n is C or 5-methylcytosine
  misc_feature (4)..(4): n is C or 5-methylcytosine
  misc_feature (5)..(5): n is A or 2,6-diaminopurine
  misc_feature (6)..(6): n is C or 5-methylcytosine
  misc_feature (7)..(7): n is U or 5-methyluracil
  misc_feature (8)..(8): n is A or 2,6-diaminopurine
  misc_feature (10)..(10): n is A or 2,6-diaminopurine
  misc_feature (11)..(11): n is U or 5-methyluracil
  misc_feature (12)..(12): n is U or 5-methyluracil
  misc_feature (13)..(13): n is C or 5-methylcytosine
  misc_feature (14)..(14): n is A or 2,6-diaminopurine
  misc_feature (15)..(15): n is U or 5-methyluracil
  misc_feature (16)..(16): n is C or 5-methylcytosine
  misc_feature (17)..(17): n is A or 2,6-diaminopurine
  misc_feature (18)..(18): n is A or 2,6-diaminopurine
  misc_feature (19)..(19): n is C or 5-methylcytosine
  misc_feature (20)..(20): n is U or 5-methyluracil
  misc_feature (21)..(21): n is A or 2,6-diaminopurine
  misc_feature (22)..(22): n is C or 5-methylcytosine
nnnnnnnngnnnnnnnnnnnnn

SEQ ID NO: 1875 - RNA, 23 nt, Artificial
  Oligonucleotide
  misc_feature (1)..(1): n is U or 5-methyluracil
  misc_feature (2)..(2): n is C or 5-methylcytosine
  misc_feature (3)..(3): n is U or 5-methyluracil
  misc_feature (4)..(4): n is U or 5-methyluracil
  misc_feature (5)..(5): n is C or 5-methylcytosine
  misc_feature (6)..(6): n is C or 5-methylcytosine
  misc_feature (7)..(7): n is A or 2,6-diaminopurine
  misc_feature (8)..(8): n is A or 2,6-diaminopurine
  misc_feature (9)..(9): n is A or 2,6-diaminopurine
  misc_feature (11)..(11): n is C or 5-methylcytosine
  misc_feature (12)..(12): n is A or 2,6-diaminopurine
  misc_feature (14)..(14): n is C or 5-methylcytosine
  misc_feature (15)..(15): n is A or 2,6-diaminopurine
  misc_feature (17)..(17): n is U or 5-methyluracil
  misc_feature (18)..(18): n is U or 5-methyluracil
  misc_feature (20)..(20): n is C or 5-methylcytosine
  misc_feature (22)..(22): n is U or 5-methyluracil
nnnnnnnnngnngnngnngngng

SEQ ID NO: 1876 - RNA, 19 nt, Artificial
  Oligonucleotide
  misc_feature (1)..(1): n is U or 5-methyluracil
  misc_feature (2)..(2): n is C or 5-methylcytosine
  misc_feature (3)..(3): n is U or 5-methyluracil
  misc_feature (5)..(5): n is U or 5-methyluracil
  misc_feature (6)..(6): n is A or 2,6-diaminopurine
  misc_feature (8)..(8): n is C or 5-methylcytosine
  misc_feature (9)..(9): n is U or 5-methyluracil
  misc_feature (11)..(11): n is C or 5-methylcytosine
  misc_feature (12)..(12): n is C or 5-methylcytosine
  misc_feature (13)..(13): n is A or 2,6-diaminopurine
  misc_feature (15)..(15): n is C or 5-methylcytosine
  misc_feature (16)..(16): n is C or 5-methylcytosine
  misc_feature (17)..(17): n is A or 2,6-diaminopurine
  misc_feature (18)..(18): n is U or 5-methyluracil
  misc_feature (19)..(19): n is U or 5-methyluracil
nnngnngnngnnngnnnnn

SEQ ID NO: 1877 - RNA, 19 nt, Artificial
  Oligonucleotide
  misc_feature (1)..(1): n is U or 5-methyluracil
  misc_feature (2)..(2): n is C or 5-methylcytosine
  misc_feature (3)..(3): n is C or 5-methylcytosine
  misc_feature (4)..(4): n is U or 5-methyluracil
  misc_feature (5)..(5): n is U or 5-methyluracil
  misc_feature (6)..(6): n is A or 2,6-diaminopurine
  misc_feature (8)..(8): n is C or 5-methylcytosine
  misc_feature (9)..(9): n is U or 5-methyluracil
  misc_feature (10)..(10): n is U or 5-methyluracil
  misc_feature (11)..(11): n is C or 5-methylcytosine
  misc_feature (12)..(12): n is C or 5-methylcytosine
  misc_feature (13)..(13): n is A or 2,6-diaminopurine
  misc_feature (15)..(15): n is C or 5-methylcytosine
  misc_feature (16)..(16): n is C or 5-methylcytosine
  misc_feature (17)..(17): n is A or 2,6-diaminopurine
  misc_feature (18)..(18): n is U or 5-methyluracil
  misc_feature (19)..(19): n is U or 5-methyluracil
nnnnnngnnnnnngnnnnn

SEQ ID NO: 1878 - RNA, 23 nt, Artificial
  Oligonucleotide
  misc_feature (1)..(1): n is U or 5-methyluracil
  misc_feature (2)..(2): n is C or 5-methylcytosine
  misc_feature (3)..(3): n is U or 5-methyluracil
  misc_feature (5)..(5): n is U or 5-methyluracil
  misc_feature (6)..(6): n is A or 2,6-diaminopurine
  misc_feature (8)..(8): n is C or 5-methylcytosine
  misc_feature (9)..(9): n is U or 5-methyluracil
  misc_feature (11)..(11): n is C or 5-methylcytosine
  misc_feature (12)..(12): n is C or 5-methylcytosine
  misc_feature (13)..(13): n is A or 2,6-diaminopurine
  misc_feature (15)..(15): n is C or 5-methylcytosine
  misc_feature (16)..(16): n is C or 5-methylcytosine
  misc_feature (17)..(17): n is A or 2,6-diaminopurine
  misc_feature (18)..(18): n is U or 5-methyluracil
  misc_feature (19)..(19): n is U or 5-methyluracil
  misc_feature (20)..(20): n is C or 5-methylcytosine
  misc_feature (21)..(21): n is U or 5-methyluracil
  misc_feature (23)..(23): n is U or 5-methyluracil
nnngnngnngnnngnnnnnnngn

SEQ ID NO: 1879 - RNA, 23 nt, Artificial
  Oligonucleotide
  misc_feature (1)..(1): n is U or 5-methyluracil
  misc_feature (2)..(2): n is C or 5-methylcytosine
  misc_feature (3)..(3): n is C or 5-methylcytosine
  misc_feature (4)..(4): n is U or 5-methyluracil
  misc_feature (5)..(5): n is U or 5-methyluracil
  misc_feature (6)..(6): n is A or 2,6-diaminopurine
  misc_feature (8)..(8): n is C or 5-methylcytosine
  misc_feature (9)..(9): n is U or 5-methyluracil
  misc_feature (10)..(10): n is U or 5-methyluracil
  misc_feature (11)..(11): n is C or 5-methylcytosine
  misc_feature (12)..(12): n is C or 5-methylcytosine
  misc_feature (13)..(13): n is A or 2,6-diaminopurine
  misc_feature (15)..(15): n is C or 5-methylcytosine
  misc_feature (16)..(16): n is C or 5-methylcytosine
  misc_feature (17)..(17): n is A or 2,6-diaminopurine
  misc_feature (18)..(18): n is U or 5-methyluracil
  misc_feature (19)..(19): n is U or 5-methyluracil
  misc_feature (21)..(21): n is U or 5-methyluracil
  misc_feature (23)..(23): n is U or 5-methyluracil
nnnnnngnnnnnngnnnnngngn

SEQ ID NO: 1880 - RNA, 21 nt, Artificial
  Oligonucleotide
  misc_feature (1)..(1): n is U or 5-methyluracil
  misc_feature (2)..(2): n is C or 5-methylcytosine
  misc_feature (3)..(3): n is U or 5-methyluracil
  misc_feature (4)..(4): n is U or 5-methyluracil
  misc_feature (6)..(6): n is U or 5-methyluracil
  misc_feature (7)..(7): n is A or 2,6-diaminopurine
  misc_feature (8)..(8): n is C or 5-methylcytosine
  misc_feature (9)..(9): n is U or 5-methyluracil
  misc_feature (11)..(11): n is A or 2,6-diaminopurine
  misc_feature (12)..(12): n is U or 5-methyluracil
  misc_feature (13)..(13): n is A or 2,6-diaminopurine
  misc_feature (14)..(14): n is C or 5-methylcytosine
  misc_feature (15)..(15): n is C or 5-methylcytosine
  misc_feature (16)..(16): n is A or 2,6-diaminopurine
  misc_feature (17)..(17): n is C or 5-methylcytosine
  misc_feature (18)..(18): n is U or 5-methyluracil
  misc_feature (20)..(20): n is A or 2,6-diaminopurine
  misc_feature (21)..(21): n is U or 5-methyluracil
nnnngnnnngnnnnnnnngnn

SEQ ID NO: 1881 - RNA, 21 nt, Artificial
  Oligonucleotide
  misc_feature (1)..(1): n is U or 5-methyluracil
  misc_feature (2)..(2): n is C or 5-methylcytosine
  misc_feature (3)..(3): n is U or 5-methyluracil
  misc_feature (4)..(4): n is U or 5-methyluracil
  misc_feature (6)..(6): n is U or 5-methyluracil
  misc_feature (7)..(7): n is A or 2,6-diaminopurine
  misc_feature (8)..(8): n is C or 5-methylcytosine
  misc_feature (9)..(9): n is U or 5-methyluracil
  misc_feature (10)..(10): n is U or 5-methyluracil
  misc_feature (11)..(11): n is C or 5-methylcytosine
  misc_feature (12)..(12): n is A or 2,6-diaminopurine
  misc_feature (13)..(13): n is U or 5-methyluracil
  misc_feature (14)..(14): n is C or 5-methylcytosine
  misc_feature (15)..(15): n is C or 5-methylcytosine
  misc_feature (16)..(16): n is A or 2,6-diaminopurine
  misc_feature (17)..(17): n is C or 5-methylcytosine
  misc_feature (18)..(18): n is U or 5-methyluracil
  misc_feature (20)..(20): n is A or 2,6-diaminopurine
  misc_feature (21)..(21): n is U or 5-methyluracil
nnnngnnnnnnnnnnnnngnn

SEQ ID NO: 1882 - RNA, 20 nt, Artificial
  Oligonucleotide
  misc_feature (1)..(1): n is U or 5-methyluracil
  misc_feature (2)..(2): n is C or 5-methylcytosine
  misc_feature (3)..(3): n is U or 5-methyluracil
  misc_feature (4)..(4): n is C or 5-methylcytosine
  misc_feature (5)..(5): n is A or 2,6-diaminopurine
  misc_feature (8)..(8): n is A or 2,6-diaminopurine
  misc_feature (9)..(9): n is A or 2,6-diaminopurine
  misc_feature (10)..(10): n is U or 5-methyluracil
  misc_feature (11)..(11): n is U or 5-methyluracil
  misc_feature (12)..(12): n is U or 5-methyluracil
  misc_feature (14)..(14): n is U or 5-methyluracil
  misc_feature (16)..(16): n is U or 5-methyluracil
  misc_feature (17)..(17): n is C or 5-methylcytosine
  misc_feature (18)..(18): n is U or 5-methyluracil
  misc_feature (19)..(19): n is U or 5-methyluracil
  misc_feature (20)..(20): n is U or 5-methyluracil
nnnnnggnnnnngngnnnnn

SEQ ID NO: 1883 - RNA, 20 nt, Artificial
  Oligonucleotide
  misc_feature (1)..(1): n is U or 5-methyluracil
  misc_feature (2)..(2): n is C or 5-methylcytosine
  misc_feature (3)..(3): n is U or 5-methyluracil
  misc_feature (4)..(4): n is C or 5-methylcytosine
  misc_feature (5)..(5): n is A or 2,6-diaminopurine
  misc_feature (8)..(8): n is A or 2,6-diaminopurine
  misc_feature (9)..(9): n is U or 5-methyluracil
  misc_feature (10)..(10): n is U or 5-methyluracil
  misc_feature (11)..(11): n is U or 5-methyluracil
  misc_feature (12)..(12): n is U or 5-methyluracil
  misc_feature (13)..(13): n is U or 5-methyluracil
  misc_feature (14)..(14): n is U or 5-methyluracil
  misc_feature (17)..(17): n is C or 5-methylcytosine
  misc_feature (18)..(18): n is U or 5-methyluracil
  misc_feature (20)..(20): n is U or 5-methyluracil
nnnnnggnnnnnnnggnngn

SEQ ID NO: 1884 - RNA, 25 nt, Artificial
  Oligonucleotide
  misc_feature (25)..(25): n is LNA-G
cugccaaaugacuugucuucaggan

SEQ ID NO: 1885 - RNA, 25 nt, Artificial
  Oligonucleotide
  misc_feature (1)..(1): n is LNA-5-methylcytosine
  misc_feature (25)..(25): n is LNA-G
nugccaaaugacuugucuucaggan

SEQ ID NO: 1886 - RNA, 25 nt, Artificial
  Oligonucleotide
  misc_feature (1)..(1): n is LNA-5-methylcytosine
  misc_feature (13)..(13): n is LNA-5-methyluracil
  misc_feature (25)..(25): n is LNA-G
nugccaaaugacnugucuucaggan

SEQ ID NO: 1887 - RNA, 25 nt, Artificial
  Oligonucleotide
  misc_feature (1)..(1): n is LNA-5-methylcytosine
  misc_feature (9)..(9): n is LNA-5-methyluracil
  misc_feature (17)..(17): n is LNA-5-methyluracil
  misc_feature (25)..(25): n is LNA-G
nugccaaangacuugunuucaggan

SEQ ID NO: 1888 - RNA, 26 nt, Artificial
  Oligonucleotide
  misc_feature (19)..(19): n is LNA-5-methyluracil
  misc_feature (22)..(22): n is LNA-G
  misc_feature (23)..(23): n is LNA-A
  misc_feature (25)..(25): n is LNA-A
cugccaaaugacuugucuncanngng

SEQ ID NO: 1889 - RNA, 26 nt, Artificial
  Oligonucleotide
  misc_feature (1)..(1): n is LNA-5-methylcytosine
  misc_feature (2)..(2): n is LNA-5-methyluracil
  misc_feature (3)..(3): n is LNA-G
  misc_feature (6)..(6): n is LNA-A
  misc_feature (7)..(7): n is LNA-A
  misc_feature (9)..(9): n is LNA-5-methyluracil
  misc_feature (12)..(12): n is LNA-5-methylcytosine
  misc_feature (18)..(18): n is LNA-5-methyluracil
  misc_feature (19)..(19): n is LNA-5-methyluracil
  misc_feature (22)..(22): n is LNA-G
  misc_feature (23)..(23): n is LNA-A
  misc_feature (25)..(25): n is LNA-A
nnnccnnanganuugucnncanngng

SEQ ID NO: 1890 - RNA, 25 nt, Artificial
  Oligonucleotide
  misc_feature (4)..(4): n is LNA-5-methylcytosine
cugncaaaugacuugucuucaggag

SEQ ID NO: 1891 - RNA, 25 nt, Artificial
  Oligonucleotide
  misc_feature (1)..(1): n is LNA-5-methylcytosine
  misc_feature (2)..(2): n is LNA-5-methyluracil
  misc_feature (3)..(3): n is LNA-G
  misc_feature (4)..(4): n is LNA-5-methylcytosine
  misc_feature (5)..(5): n is LNA-5-methylcytosine
  misc_feature (6)..(6): n is LNA-A
  misc_feature (7)..(7): n is LNA-A
  misc_feature (9)..(9): n is LNA-5-methyluracil
  misc_feature (10)..(10): n is LNA-G
  misc_feature (12)..(12): n is LNA-5-methylcytosine
  misc_feature (13)..(13): n is LNA-5-methyluracil
  misc_feature (15)..(15): n is LNA-G
  misc_feature (16)..(16): n is LNA-5-methyluracil
nnnnnnnannannunncuucaggag
